(19) United States
(12) Patent Application Publication
(10) Pub. No.: US 2025/0325599 A1
(43) Pub. Date: Oct. 23, 2025

(54) A CLINICAL ISOLATED AVIRULENT STRAIN PROTECTS AGAINST WILDTYPE VIRULENT CLOSTRIDIOIDES DIFFICILE INFECTION

(71) Applicant: THE UNIVERSITY OF CHICAGO, Chicago, IL (US)

(72) Inventors: Eric PAMER, Chicago, IL (US); Qiwen DONG, Chicago, IL (US)

(73) Assignee: THE UNIVERSITY OF CHICAGO, Chicago, IL (US)

(21) Appl. No.: 18/870,325

(22) PCT Filed: May 31, 2023
(86) PCT No.: PCT/US2023/067674

§ 371 Date: Nov. 27, 2024

Related U.S. Application Data
(60) Provisional application No. 63/347,268, filed on May 31, 2022.
(60) Provisional application No. 63/359,594, filed on Jul. 8, 2022.
(60) Provisional application No. 63/359,410, filed on Jul. 8, 2022.

(51) Int. Cl. A61K 35/74; A61K 39/00; A61K 39/02; A61K 45/06; A61P 31/04; C12N 1/20; C12N 7/00; C12N 9/22; C12N 15/11; C12Q 1/6809; C12Q 1/686; C12Q 1/689; C12R 1/01

(52) U.S. Cl. CPC A61K 35/74; A61K 39/0208; A61K 45/06; A61P 31/04; C12N 1/20; C12N 7/00; C12N 9/222; C12N 15/111; C12Q 1/6809; C12Q 1/686; C12Q 1/689; A61K 2039/522; C12N 2310/20; C12N 2795/14021; C12N 2795/14041; C12R 2001/01

(57) ABSTRACT

Aspects herein concern cdtR mutations that can lead to reduced or absent virulence in C. difficile bacteria. Disclosed are compositions and methods using the cdtR mutants to treat or prevent C. difficile infections or diseases caused by C. difficile. Also disclosed are methods for detecting or determining C. difficile virulence based on mutation status of the cdtR gene in C. difficile.

### CROSS-REFERENCE TO RELATED APPLICATIONS

[0001] This application claims the benefit of priority to U.S. Provisional Patent Application Ser. No. 63/347,268, filed May 31, 2022, U.S. Provisional Patent Application Ser. No. 63/359,410, filed Jul. 8, 2022, and U.S. Provisional Patent Application Ser. No. 63/359,594, filed on Jul. 8, 2022, each of which are hereby incorporated by reference in their entirety.

[0002] This invention was made with government support under grant number AI095706 awarded by the National Institutes of Health. The government has certain rights in the invention.

### BACKGROUND OF THE INVENTION

### I. Sequence Listing

[0003] The instant application contains a Sequence Listing which has been submitted in XML format and is hereby incorporated by reference in its entirety. Said XML copy, created on May 30, 2023, is named “ARCD.P0771WO—Sequence Listing” and is 16.524 kilobytes in size.

### II. Field of the Invention

[0004] This invention relates to the field of microbiology, medicine, and pathology.

### III. Background

[0005] Clostridioides difficile is a Gram-positive, spore-forming anaerobic bacterium, and the leading cause of nosocomial infections in the United States.¹⁻³ Infections are acquired by oral ingestion of C. difficile spores, which are prevalent in the environment and can survive for extended periods of time on contaminated surfaces. Upon ingestion, C. difficile spores germinate, produce toxins and cause colitis and, in severe cases, can result in mortality. The major virulence factors of C. difficile are toxins A (tcdA) and B (tcdB), which are encoded in the Pathogenicity Locus (PaLoc).^{4,5} These toxins glycosylate and thereby inactivate host GTPases, triggering the death of intestinal epithelial cells and lead to gut inflammation.⁶

[0006] C. difficile species is comprised of hundreds of strain types across more than 6 phylogenetic clades. PCR- and sequencing-based approaches, including PCR-ribotyping (RT) and multilocus sequencing typing (MLST/ST), have been used to characterize C. difficile strain types. More recently, whole-genome sequencing (WGS) has greatly contributed to the understanding of C. difficile diversity, evolution, and epidemiology.⁷ Almost two decades ago, the BI/NAP1/027 strain, characterized as ST1 by MLST, emerged as a cause of severe nosocomial outbreaks and increased C. difficile infection (CDI) incidence in North America and Europe. Since then, the prevalence of ST1 has declined but it remains among the most frequently isolated strains in hospital and community-acquired CDI cases in the US.^{2,8-11} The ST1 C. difficile strain encodes the additional CDT toxin (encoded by cdtA and cdtB and also referred to as binary toxin), which is an ADP-ribosyltransferase that modifies actin and disrupts cellular cytoskeleton organization.¹² The ST1 strains have higher MICs to several antibiotics, most notably fluroquinolones, and produce higher amounts of toxins A and B compared to non-ST1 strains.^{13,14} The relative virulence of the ST1 strain is controversial, however, with some studies demonstrating clinical disease severities similar to other strains.¹⁵⁻¹⁷ Host factors can impact the severity of CDI, including underlying diseases, immune competence and microbiome composition.^{18,19} Whether genetic variants of ST1 explain diverse disease manifestations is unknown.

### SUMMARY OF THE INVENTION

[0007] Aspects of the disclosure relate to the discovery that mutations in the cdtR gene, including a 69-base pair, in-frame deletion (such as SEQ ID NO:9), can reduce or remove virulence of bacteria, including C. difficile. The discovery can be used to modify virulent strains of bacteria to reduce their capability to infect a patient and/or reduce the bacteria capability to cause intestinal disorders such as colitis. The discovery also allows for the administration of bacteria having a cdtR mutant, including SEQ ID NO:8, or a bacteriophage encoding the cdtR mutant, to prevent or treat a C. difficile pathology. The discovery also allows for the determining the virulence of C. difficile present in a patient, and for determining a therapeutic regime for treating the patient based on the virulence of the C. difficile present in the patient.

[0008] Aspects of the disclosure relate to a method for treating and/or preventing bacterial pathogenesis, such as C. difficile pathogenesis. Further aspects of the disclosure relate to a method of analyzing virulence of a bacteria strain present in an infection, including an infection in a patient. Yet further aspects relate to treating a bacterial infection in a patient where a cdtR gene, including a wild-type and/or mutant cdtR gene, have been identified in the bacterial infection. Yet further aspects relate to C. difficile cells, including engineered C. difficile cells, that comprise a mutant cdtR gene. Yet further aspects relate to C. difficile cells, including engineered C. difficile cells, that express a mutant cdtR protein. Yet further aspects relate to C. difficile cells, including engineered C. difficile cells, that do not express a functional cdtR protein. Yet further aspects relate to C. difficile cells, including engineered C. difficile cells, that express reduced levels of cdtR protein as compared to wild type C. difficile. Other aspects include compositions comprising at least one of the C. difficile cells disclosed herein. Other aspects include compositions comprising at least two of the C. difficile cells disclosed herein. Yet further aspects relate to bacteriophage, which may be engineered bacteriophage, that encode a mutant cdtR gene. The bacteriophage may infect a bacterial cell, including a C. difficile bacterial cell, and cause reduced levels of functional cdtR protein and/or reduce the downstream effects of the cdtR protein.

[0009] Aspects of the disclosure include various methods directed to a patient including methods for treating and/or preventing C. difficile pathogenesis, treating and/or preventing a C. difficile infection, treating and/or preventing colitis, treating and/or preventing intestinal damage, reducing the severity of a bacterial infection, reducing the virulence of a bacterial infection, reducing the virulence of a bacterium any of which may include 1, 2, 3, 4, 5, 6, or more steps including any of the following: administering to a patient a C. difficile cell having a reduced cdtR protein expression relative to a wild type C. difficile, administering to a patient a C. difficile cell that expresses a mutant cdtR protein, administering to a patient a C. difficile cell that does not express a functional cdtR protein, administering to the patient one or more antibiotics, including after administering the C. difficile cell, administering a therapeutic composition to the patient, and introducing a cdtR mutant gene to a bacterium.

[0010] Disclosed are methods for treating and/or preventing C. difficile pathogenesis, the method comprising administering to a patient a C. difficile cell having a reduced cdtR protein expression relative to a wild type C. difficile. Disclosed are methods for treating and/or preventing C. difficile pathogenesis, the method comprising administering to a patient a C. difficile cell that expresses a mutant cdtR protein. Disclosed are methods for treating and/or preventing C. difficile pathogenesis, the method comprising administering to a patient a C. difficile cell that does not express a functional cdtR protein.

[0011] In certain aspects, the C. difficile strain comprises ST1-75 (which may be referred to as MSK-CD75), which was deposited under the Budapest Treaty with the American Type Culture Collection (ATCC) on May 3, 2023 (ATCC Deposit Number PTA-127589). In certain aspects, the C. difficile strain comprises ST1-35 (which may be referred to as MSK-CD35), which was deposited under the Budapest Treaty with the American Type Culture Collection (ATCC) on May 3, 2023 (ATCC Deposit Number PTA-127588). In certain aspects, the C. difficile cell has a mutant cdtR gene relative to wild type C. difficile. The wild type C. difficile may be the most abundant C. difficile strain in a normal population of C. difficile bacteria. The wild type C. difficile may be the C. difficile strain known to one of ordinary skill in the art as being the wild type C. difficile. The wild type C. difficile may be a virulent C. difficile. The wild type C. difficile may be a common, or the most common, strain of C. difficile found in one or more patients with colitis. In certain aspects, the mutant cdtR gene comprises a nonsense mutation, a single nucleotide variation, and/or a deletion. Also disclosed are mutant cdtR gene encoding for non-functional cdtR proteins and/or cdtR proteins with reduced function relative to wild type cdtR. The cdtR mutant may have a deletion, including the 69-base pair deletion of SEQ ID NO:9. The cdtR mutant may comprise SEQ ID NO:8. The cdtR mutant may have a deletion that is functionally and/or substantially equivalent to the 69-base pair deletion of SEQ ID NO:9.

[0012] Disclosed are C. difficile strains having a mutant cdtR gene and/or expressing or having a mutant cdtR protein. Also disclosed are C. difficile strains having reduced or absent cdtR protein levels compared to wild type C. difficile strains. Also disclosed are C. difficile strains that do not express functional cdtR protein. It is specifically contemplated that, in some aspects, a strain may not have a mutation that causes reduced expression of a cdtR gene. Also disclosed are engineered C. difficile cells. The engineered C. difficile cell may be engineered to comprise a cdtR mutant, including any cdtR mutant disclosed herein. The engineered C. difficile cell may be used in methods disclosed herein, including method where a C. difficile cells is administered to a patient. Certain aspects relate to an avirulent C. difficile cell, which may be an engineered C. difficile cell, such as an engineered C. difficile cell comprising a cdtR mutant. The avirulent C. difficile cell may be ST1-35. The avirulent cell may be ST1-75. The avirulent cell may be cdtRmut6.1. The avirulent cell may be cdtRmut8.1.

[0013] In certain aspects, at least one of the disclosed C. difficile strains are administered to a patient. Certain aspects also relate to compositions comprising at least one of the C. difficile cells disclosed herein. Such composition may be a therapeutic composition and may comprise more than one C. difficile cell strain and/or one or more additional therapies. In certain aspects, one or more additional therapies are administered to the patient. The additional therapies may be another C. difficile strain, an antibiotic, or a therapy for colitis.

[0014] Also disclosed are methods for analyzing virulence of a bacterial strain, including a C. difficile strain. The bacterial strain may be a bacterial strain present in an infection. Also disclosed are methods of treating a bacterial infection where a cdtR gene has been identified in the bacterial infection. The infection may be in the colon of a patient. The bacterial strain may be analyzed from a biological sample taken from a patient infected with the bacterial strain. Analyzing the virulence may comprise identifying a cdtR gene present in the bacterial strain.

[0015] The identified cdtR gene may be the wild type cdtR gene, including the C. difficile wild type cdtR gene, such as the cdtR present in a virulent bacterial strain. The bacterial strain may be R20291. The bacterial strain may be VPI10463. In certain aspects, where the wild type cdtR gene is identified, the bacterial strain may be considered virulent. In certain aspects where the wild type cdtR gene is not identified, the bacterial strain may be considered avirulent.

[0016] The identified cdtR gene may be a mutant cdtR gene, including any mutant cdtR gene disclosed herein.

[0017] In certain aspects, the bacterial strain being considered virulent or avirulent can determine a treatment regimen for the patient. For example, if the bacterial strain is considered virulent, a treatment regimen may comprises at least one of the C. difficile strains comprising a cdtR mutant and/or one or more antibiotics. Additionally for example, if the bacterial strain is considered avirulent, a treatment regimen may comprise an antibiotic.

[0018] Also disclosed are methods of reducing the virulence of a bacterium by introducing a cdtR mutant to the bacterium. The cdtR mutant may be any cdtR mutant disclosed herein. The bacterium may be a C. difficile bacterium, including R20291. The cdtR mutant may be introduced to the bacterium in vitro. The cdtR mutant may be introduced to the bacterium in vivo, including where the bacterium is infecting a patient. The cdtR mutant gene may be introduced by infecting the bacterium with a bacteriophage that encodes the cdtR mutant gene. The cdtR mutant gene may be introduced by bacterial transformation. The cdtR mutant may be a cdtR knock out mutant. The cdtR mutant may be introduced by genetic engineering, such as CRISPR-mediated genome edits.

[0019] Also disclosed are bacteriophages encoding a mutant cdtR gene, including any mutant cdtR gene disclosed herein. The bacteriophages may be derived from prophages, including any prophage disclosed herein, such as phiCD75-2 and/or phiCD75-3.

[0020] Throughout this application, the term “about” is used to indicate that a value includes the inherent variation of error for the measurement or quantitation method.

[0021] The use of the word “a” or “an” when used in conjunction with the term “comprising” may mean “one,” but it is also consistent with the meaning of “one or more,” “at least one.” and “one or more than one.”

[0022] The phrase “and/or” means “and” or “or”. To illustrate, A, B, and/or C includes: A alone, B alone, C alone, a combination of A and B, a combination of A and C, a combination of B and C, or a combination of A, B, and C. In other words, “and/or” operates as an inclusive or.

[0023] The words “comprising” (and any form of comprising, such as “comprise” and “comprises”), “having” (and any form of having, such as “have” and “has”), “including” (and any form of including, such as “includes” and “include”) or “containing” (and any form of containing, such as “contains” and “contain”) are inclusive or open-ended and do not exclude additional, unrecited elements or method steps.

[0024] The compositions and methods for their use can “comprise.” “consist essentially of,” or “consist of” any of the ingredients or steps disclosed throughout the specification. Compositions and methods “consisting essentially of” any of the ingredients or steps disclosed limits the scope of the claim to the specified materials or steps which do not materially affect the basic and novel characteristic of the claimed invention.

[0025] It is contemplated that any embodiment discussed in this specification can be implemented with respect to any method or composition of the invention, and vice versa. Furthermore, compositions of the invention can be used to achieve methods of the invention.

[0026] Other objects, features and advantages of the present invention will become apparent from the following detailed description. It should be understood, however, that the detailed description and the specific examples, while indicating specific embodiments of the invention, are given by way of illustration only, since various changes and modifications within the spirit and scope of the invention will become apparent to those skilled in the art from this detailed description.

### BRIEF DESCRIPTION OF THE DRAWINGS

[0027] The following drawings form part of the present specification and are included to further demonstrate certain aspects of the present invention. The invention may be better understood by reference to one or more of these drawings in combination with the detailed description of specific embodiments presented herein.

[0028] FIGS. 1A-1C. Clinical ST1 C. difficile isolates demonstrated variable virulence in mice treated with antibiotics. (A) Plot of the UMAP analysis of the presence or absence of unique coding sequences (annotated proteins or un-annotated protein clusters) across top 10 STs of C. difficile strains in Patric. (B) Mouse experiment schematic: wildtype C57BL/6 mice were treated with metronidazole, vancomycin, and neomycin (MNV. 0.25 g/L for each) in drinking water for 3 days and followed by one intraperitoneal injection of clindamycin (200 μg/mouse) 2 days after antibiotic recess. Then, mice were inoculated with 200 C. difficile spores via oral gavage. Daily body weight and acute disease scores were monitored for 7 days post infection. (C) % Max weight loss to baseline were calculated using the lowest weights within 7 days post infection divided by day 0 weights. N (Number of mice per strain-infected group)=5-8 except for ST1-62 and ST1-68, which have 2 mice per group.

[0029] FIGS. 2A-2H. Two isolated clinical strains of C. difficile have no virulence in mice treated with antibiotics. Wildtype C57BL/6 mice (n=3-5 per group) were treated with metronidazole, vancomycin, and neomycin (MNV. 0.25 g/L for each) in drinking water for 3 days and followed by one intraperitoneal injection of clindamycin (200 μg/mouse) 2 days after antibiotic recess. Then, mice were inoculated with 200 C. difficile spores via oral gavage. Daily body weight and acute disease scores were monitored for 7 days post infection. (A, D) % Weight loss to baseline of mice infected with indicated strains. (B. E) Acute disease scores comprising weight loss, body temperature drop, diarrhea, morbidity of mice infected with indicated strains. (C, F) Fecal colony-forming units measured by plating on selective agar on indicated days. (G-H) Fecal toxins measured by CHO cell rounding assay 1 day post infection.

[0030] FIGS. 3A-3H. Avirulent C. difficile strain demonstrates no virulence in innate immune deficient mice and germ-free mice. (A-D) MyD88/mice (n=4 per group) were treated with MNV and clindamycin before orally administered with 200 spores of C. difficile strains. Daily body weight and acute disease scores were monitored for 7 days post infection. (A) % Weight loss to baseline of mice infected with indicated strains. (B) Acute disease scores comprising weight loss, body temperature drop, diarrhea, morbidity of mice infected with indicated strains. (C) Fecal colony-forming units measured by plating on selective agar 1 day post infection. (D) Fecal toxins measured by CHO cell rounding assay 1 day post infection. (E-H) Germ-free mice (n=3 to 5) orally administered with 200 spores of indicated C. difficile strains. Daily body weight and acute disease scores were monitored for 10 days post infection. (E) % Weight loss to baseline of mice infected with indicated strains. (F) Diarrhea scores of mice infected with indicated strains 2 days post infection. (G) Fecal colony-forming units measured by plating on selective agar at 6, 12, and 24 hours post infection. (H) Fecal toxins measured by CHO cell rounding assay at 6, 12, and 24 hours post infection. Statistical significance was calculated by Unpaired t-test. * p<0.05. ** p<0.01.

[0031] FIGS. 4A-4E. Prophages identified in avirulent C. difficile mildly impact virulence in mice treated with antibiotics. (A) Anvi'o plot displaying accessory genomes of ST1 isolates. Highlighted gene clusters in purple are unique to ST1-35 and ST1-75. Blue dashes (outmost layer) indicate phage-related genes by NCBI COG. (B) Schematic of mutant strains made using R20291 C. difficile strain. (C-E) Wildtype C57BL/6 mice (n=4 per group) were treated with MNV and clindamycin as preciously described. Then, mice were inoculated with 200 C. difficile spores via oral gavage. Daily body weight and acute disease scores were monitored for 7 days post infection. (C) % Weight loss to baseline of mice infected with indicated strains. (D) Acute disease scores comprising weight loss, body temperature drop, diarrhea, morbidity of mice infected with indicated strains. (E) Fecal colony-forming units measured by plating on selective agar 1 day post infection.

[0032] FIGS. 5A-5G. Binary toxin regulator cdtR contributes to C. difficile virulence in mice. (A) Deletion identified in ST1-35/75 and schematic of cdtR mutants generated using R20291 C. difficile strain. (B) Germ-free mice (n=3 per group) orally administered with 200 spores of indicated C. difficile strains. Binary toxin gene cdtB transcripts were measured by RT-qPCR on cecal contents harvested at 24 hours post infection. Transcripts were normalized to the adk and fold change is relative to ST1-75 condition. (C-E) Wildtype C57BL/6 mice (n=3 to 5 per group) were treated with MNV and clindamycin as preciously described. Then, mice were inoculated with 200 C. difficile spores via oral gavage. Daily body weight and acute disease scores were monitored for 7 days post infection. (C) % Weight loss to baseline of mice infected with indicated strains. (D) Acute disease scores comprising weight loss, body temperature drop, diarrhea, morbidity of mice infected with indicated strains. (E) Fecal toxins measured by CHO cell rounding assay on indicated days. (F-G) Germ-free mice (n=4) orally administered with 200 spores of indicated C. difficile strains. Daily body weight and were monitored for 5 days post infection. (F) % Weight loss to baseline of mice infected with indicated strains. (G) Diarrhea scores of mice infected with indicated strains 3 days post infection. Statistical significance was calculated by One-way ANOVA. * p<0.05. ** p<0.01.

[0033] FIGS. 6A-6B. CdtR regulates PaLoc toxins transcription in vivo. Germ-free mice (n=4) were orally administered with 200 spores of indicated C. difficile strains and cecal contents were harvested at 24 hours post infection. (A) Cecal toxins measured by CHO cell rounding assay. (B) Indicated gene transcripts were measured by RT-qPCR. Transcripts were all normalized to the adk and fold change is relative to ST1-75 for each of the genes. Statistical significance was calculated by Unpaired t-test. * p<0.05. ** p<0.01. **** p<0.0001.

[0034] FIG. 7. Binary toxin regulator cdtR is prevalent in clinical C. difficile isolates. Binary toxin cdtA, cdtB and cdtR from R20291 were used as query to BLAST against the assembled contigs. Hits with at least 85% identity and 85% coverage of the query were considered a valid match. Numbers of match in total and percentages are presented.

[0035] FIGS. 8A-8D. ST1 C. difficile strains are closely related. (A) Pathogenicity loci were extracted from whole-genome sequence and multiple sequence alignment was performed for all strains. Each dash indicates one single-nucleotide polymorphism. (B) Average nucleotide identity was calculated with pairs of ST1 isolates. (C) Survival curve of indicated strain over a 7-day time course post infection. (D) Fecal colony-forming units measured by plating on selective agar on 1 day post infection from FIG. 1C.

[0036] FIGS. 9A-9D. Avirulent C. difficile strain demonstrates no virulence in germ-free mice. Germ-free mice (n=4 per group) orally administered with 200 spores of indicated C. difficile strains. Daily body weight and acute disease scores were monitored for 6 days post infection. (A) % Weight loss to baseline of mice infected with indicated strains. (B) Diarrhea scores of mice infected with indicated strains on 3 days post infection. (C) Fecal colony-forming units measured by plating on selective agar 1 day post infection. (D) Fecal toxins measured by CHO cell rounding assay 1 day post infection. Statistical significance was calculated by Unpaired t-test. * p<0.05. ** p<0.01.

[0037] FIGS. 10A-10D. Unique prophages identified in two avirulent C. difficile strains. (A) Schematic of prophages identified in avirulent strains. Each arrow represents a coding sequence whose product is indicated, when available. Numbers refer to the CDS when no function could be assigned. Gene products are colored by functional groups; yellow=packaging; red=head morphogenesis proteins; blue=tail morphogenesis proteins; cyan=lysis module; green=gene regulation and DNA replication; orange=lysogeny; grey=other or unknown function. Maps were generated with Benchling and finalized in Inkscape v1.2. (B-D) Wildtype C57BL/6 mice (n=4 per group) were treated with MNV and clindamycin as preciously described. Then, mice were inoculated with 200 C. difficile spores via oral gavage. (B) Fecal toxins measured by CHO cell rounding assay 1 day post infection. (C) Fecal colony-forming units measured by plating on selective agar 7 days post infection. (D) Fecal toxins measured by CHO cell rounding assay 7 days post infection.

[0038] FIGS. 11A-11G. Binary toxin regulator cdtR does not impact C. difficile colonization in mice. (A) Schematic of cdtR mutants generated using R20291 C. difficile strain. (B-F) Wildtype C57BL/6 mice (n=3 to 5 per group) were treated with MNV and clindamycin as preciously described. Then, mice were inoculated with 200 C. difficile spores via oral gavage. Daily body weight and acute disease scores were monitored for 7 days post infection. (B) % Weight loss to baseline of mice infected with indicated strains. (C) Acute disease scores comprising weight loss, body temperature drop, diarrhea, morbidity of mice infected with indicated strains. (D, F) Fecal colony-forming units measured by plating on selective agar 1 day post infection (E) Fecal toxins measured by CHO cell rounding assay on indicated days. (G) Germ-free mice (n=4) orally administered with 200 spores of indicated C. difficile strains. Fecal colony-forming units measured by plating on selective agar 1 day post infection. Statistical significance was calculated by One-way ANOVA. * p<0.05.

[0039] FIGS. 12A-12E. CdtR regulates PaLoc toxins production. (A-B) Wildtype C57BL/6 mice (n=3-5 per group) were treated with MNV and clindamycin as preciously described. Then, mice were inoculated with 200 C. difficile spores via oral gavage. (A) Fecal toxins measured by CHO cell rounding assay 7 days post infection for ST1-35. (B) Fecal toxins measured by CHO cell rounding assay 14 days post infection for ST1-75. (C-E) Germ-free mice (n=3-4) orally administered with 200 spores of indicated C. difficile strains and cecal contents were harvested at 24 hours post infection. (C) Cecal CFU measured by plating on selective agar. (D) Cecal toxin as in FIG. 5A was normalized to CFU. (E) PaLoc and CdtLoc transcripts were measured by RT-qPCR. Transcripts were all normalized to the adk and fold change is relative to CdtRmut_6.1 for each of the genes. Statistical significance was calculated by Unpaired t-test, * p<0.05, ** p<0.01.

[0040] FIGS. 13A-13C. ST1-75/35 harbors unique mutations in cdtR. (A) cdtR hits without starting position at the beginning of C. difficile contigs were chosen to further examine their nucleotide differences in cdtR gene to R20291 and ST1-75. Five out of 491 ST1 isolates (from both strain collection databases) were found to have nucleotide variants. (B) Phylogenetic tree build based on core genome snps of ST1 isolates against R20291. (C) Timeline of hospital stay and spatial overlap between the two patients harboring ST1-75 and ST1-35.

[0041] FIGS. 14A-14E. Avirulent C. difficile strain provides protection against virulent infection in mice. (A) Schematic showing experimental procedure (B) % Weight loss to baseline of mice infected with indicated strains. (C) Acute disease scores comprising weight loss, body temperature drop, diarrhea, morbidity of mice infected with indicated strains. (D) Fecal colony-forming units measured by plating on selective agar on 1 day post infection. (E) Wildtype cdtR copies in feces from infected mice were measured by qPCR on 1 day post infection. Statistical significance was calculated by One-way ANOVA. **** p<0.0001.

[0042] FIGS. 15A-15B. Challenge of virulent infection with ST1-75 can replace R20291. (A) % Weight loss to baseline of mice infected with indicated strains. 1:1 ratio of ST1-75 and R20291 co-administered on time 0 (triangle), R20291 administered at time 0 followed by 200 ST1-75 spores 6 hrs later (upside-down triangle), R20291 administered at time 0 followed by 104 ST1-75 spores 6 hrs later (diamond), R20291 administered at time 0 followed by 104 ST1-75 spores 24 hrs later (circle), R20291 administered at time 0 followed by 105 vegetative ST1-75 24 hrs later (square). (B) Wildtype cdtR copies in feces from infected mice were measured by qPCR on 1 day and 7 days post infection. Statistical significance was calculated by One-way ANOVA. * p<0.05. ** p<0.01. **** p<0.0001. Y-axis indicates cdtR region, proxy for R20291 in fecal sample; by day 7, R20291 signal is decreased in the following conditions: R20291 administered at time 0 followed by 200 ST1-75 spores 6 hrs later, R20291 administered at time 0 followed by 104 ST1-75 spores 6 hrs later, 1:1 ratio of ST1-75 and R20291 administered on time 0, however, R20291 signal is not decreased when administered after 24 hrs.

[0043] FIGS. 16A-16C. Co-infection with cdtRmut is not protective against symptoms (weight, acute disease score), yet replaces WT strains. (A) Fecal colony-forming units measured by plating on selective agar on 1 day post infection. (B) % Weight loss to baseline of mice infected with indicated strains: mice administered cdtRmut (circle), R20291 (square), or 1:1 ratio of cdtRmut and R20291 (hexagon). (C) Wildtype cdtR copies in feces from infected mice were measured by qPCR on 1 day. 5 days and 7 days post infection. Statistical significance was calculated by One-way ANOVA. **** p<0.0001. Y-axis indicates cdtR region, proxy for R20291 in fecal sample; by day 8, R20291 signal is decreased in the following conditions: 1:1 ratio of cdtRmut and R20291 administered on time 0.

[0044] FIGS. 17A-17B. cdtRmut 6h challenge also replaces R20291. (A) % Weight loss to baseline of mice infected with indicated strains: mice administered cdtRmut (circle), R20291 (square), R20291 administered at time 0 followed by 200 cdtRmut spores 6 hrs later (R20291>CdtRmut, diamond) or cdtRmut administered at time 0 followed by 200 R20291 spores 6 hrs later (R20291>CdtRmut, diamond). (B) Wildtype cdtR copies in feces from infected mice were measured by qPCR on 1 day, 2 days and 21 days post infection. Y-axis indicates cdtR region, proxy for R20291 in fecal sample; by day 3 to day 21, R20291 signal is decreased in the following conditions: R20291 administered at time 0 followed by 200 cdtRmut spores 6 hrs later (R20291>CdtRmut) and cdtRmut administered at time 0 followed by 200 R20291 spores 6 hrs later (R20291>CdtRmut).

[0045] FIGS. 18A-18D. CdtRmut replacing virulent strain leads to protection upon transmission. (A) Schematic showing experimental setup: C. difficile infected mice is co-housed with antibiotics-treated mice (that are susceptible to transmission). (B) Fecal colony-forming units measured by plating on selective agar on 1 day post infection. (C) % Weight loss to baseline of mice co-housed with infected mice priorly with indicated strains: mice administered cdtRmut (circle). R20291 (square). 1:1 ratio of cdtRmut and R20291 (hexagon). (D) Wildtype cdtR copies in feces from infected mice were measured by qPCR on 1 day post infection. Y-axis indicates cdtR region, proxy for R20291 in fecal sample; X-axis indicate the body weight of transmitted mice. Less body weight loss correlates with less wildtype strain transmitted.

[0046] FIGS. 19A-19D. ST1-75 protection is microbiome independent. CdtRmut replacing virulent strain leads to protection upon transmission. (A) % Weight loss to baseline of mice infected with indicated strains: mice administered ST1-75 (circle). R20291 (square). 1:1 ratio of ST1-75 and R20291 (upside-down triangle). (B) Diarrhea scores of mice infected with indicated strains 2 days post infection. (C) Fecal colony-forming units measured by plating on selective agar on 1 day post infection. (D) Wildtype cdtR copies in feces from infected mice were measured by qPCR on 1 day post infection.

[0047] FIGS. 20A-20C. Avirulent C. difficile provides long-term protection via colonization resistance. (A) Schematic showing experimental procedure (B) % Weight loss to baseline of mice infected with indicated strains. Mice pre-treated with H₂O (black circle), mice pre-treated with H₂O and challenged with R20291 (H2O>R20291, square), mice pre-inoculated with ST1-75 (green circle), mice pre-inoculated with ST1-75 and challenged with R20291 (ST1-75>R20291, upside-down triangle). (C) Fecal colony-forming units measured by plating on selective agar on indicated days post infection. ST1-75 survived antibiotics challenge and bounced back to high levels to provide colonization resistance against virulent C. difficile R20291.

[0048] FIGS. 21A-21D. Figure S3 Avirulent C. difficile provides long-term protection to prevent virulent recurrence. (A) % Weight loss to baseline of mice infected with indicated strains. Mice pre-treated with H₂O and challenged with R20291 (H2O>R20291, square), mice pre-inoculated with cdtRmut (circle), mice pre-inoculated with cdtRmut and challenged with R20291 (cdtRmut >R20291, hexagon). (B) Fecal colony-forming units of cdtRmut measured by plating on selective agar on indicated days post infection. CdtRmut survived antibiotics challenge to provide colonization resistance against virulent C. difficile R20291. (C) % Weight loss to baseline of mice infected with indicated strains. Mice pre-inoculated with ST1-75 and challenged with R20291 (ST1-75>R20291, circle), mice pre-inoculated with R20291 and challenged with R20291 (R20291>R20291, square), mice pre-inoculated with 1:1 ratio of ST1-75 and R20291, and challenged with R20291 (ST1-75: R20291>R20291, upside-down triangle). (D) Fecal colony-forming units of resulting C. difficile from each condition in S3C measured by plating on selective agar on indicated days post infection. Antibiotics treatment induce virulent recurrence of C. difficile infection in mice infected with R20291 previously. However, introducing ST1-75 prior (in the case of ST1-75>R20291 and ST1-75: R20291>R20291) protected mice form virulent recurrence.

### DETAILED DESCRIPTION OF THE INVENTION

[0049] Clostridioides difficile produces toxins that damage the colonic epithelium and causes colitis. Variation in disease severity is poorly understood and has been attributed to host factors and virulence differences between C. difficile strains. At least 23 epidemic ST1 C. difficile clinical isolates are disclosed herein. In some aspects, the isolate comprises Certain isolates encode a complete Ted pathogenicity locus and achieved similar colonization densities. However, disease severity may vary from lethal to avirulent infections, in certain aspects. In certain aspects, the bacteria comprise a 69-bp deletion in the cdtR gene, which encodes a response regulator for binary toxin expression. Deleting the 69-bp sequence in virulent bacteria, such as the R20291 strain, may render it avirulent, including in mice with reduced toxin gene transcription. Certain aspects herein demonstrate that a natural deletion within cdtR can attenuate virulence in the epidemic ST1 C. difficile strain without reducing colonization and persistence. Distinguishing strains on the basis of cdtR may enhance the specificity of diagnostic tests for C. difficile colitis.

[0050] Certain aspects herein relate to the use of an antibiotic-treated mouse model of C. difficile infection to test a panel of PaLoc- and CdtLoc-encoding ST1 C. difficile clinical isolates to quantify disease severity.²⁰ Clinical C. difficile isolates with identical PaLoc are disclosed to cause a range of disease severities, with at least two isolates disclosed to cause no detectable disease in antibiotic-treated wild type, germ-free mice or Myd88-defecient mice. Also disclosed are deletions in the cdtR gene, including a 69-bp deletion in the cdtR gene of the two avirulent isolates, which encodes a LytTR family response regulator that regulates CDT expression. The 69-bp deletion in the cdtR leads to reduced CDT toxin and PaLoc gene expression, resulting in loss of virulence and confirming previous studies implicating CdtR as regulator of CDT and Ted toxins expression.²¹ Studies herein are the first to describe virulence diversity within a single strain type and demonstrates the critical role of CdtR for ST1 C. difficile virulence.

### I. Proteins

[0051] As used herein, a “protein” or “polypeptide” refers to a molecule comprising at least five amino acid residues. As used herein, the term “wild type” refers to the most prevalent allele of a gene in a certain species. In some aspects, a wild type cdtR encodes a fully functional protein that positively regulate downstream CDT toxin expression and TcdA and TcdB expression. A “variant” or a “mutant” refers to an allele or gene sequence encoding a protein or polypeptide whose chemical structure, particularly its amino acid sequence, is altered with respect to the wild-type protein or polypeptide. In some embodiments, a mutant/variant protein or polypeptide has at least one modified activity or function (recognizing that proteins or polypeptides may have multiple activities or functions). It is specifically contemplated that a mutant/variant protein or polypeptide may be altered with respect to one activity or function yet retain a wild-type activity or function in other respects.

[0052] In particular embodiments, there are isolated nucleic acid segments, recombinant vectors, and/or phages incorporating nucleic acid sequences that encode a cdtR mutant polypeptide. The term “recombinant” may be used in conjunction with a polypeptide or the name of a specific polypeptide, and this generally refers to a polypeptide produced from a nucleic acid molecule that has been manipulated in vitro or that is a replication product of such a molecule.

[0053] It is contemplated that a cdtR wild type protein may be mutated by truncation, rendering them shorter than their corresponding wild-type form, also, they might be altered by fusing or conjugating a heterologous protein or polypeptide sequence with a particular function (e.g., for targeting or localization, for enhanced immunogenicity, for purification purposes, etc.). As used herein, the term “domain” refers to any distinct functional or structural unit of a protein or polypeptide, and generally refers to a sequence of amino acids with a structure or function recognizable by one skilled in the art.

[0054] The cdtR proteins or polynucleotides encoding cdtR may include 1, 2, 3, 4, 5, 6, 7, 8, 9, 10, 11, 12, 13, 14, 15, 16, 17, 18, 19, 20, 21, 22, 23, 24, 25, 26, 27, 28, 29, 30, 31, 32, 33, 34, 35, 36, 37, 38, 39, 40, 41, 42, 43, 44, 45, 46, 47, 48, 49, or 50 (or any derivable range therein) or more variant amino acids or nucleic acid substitutions or be at least 60%, 61%, 62%, 63%, 64%, 65%, 66%, 67%, 68%, 69%, 70%, 71%, 72%, 73%, 74%, 75%, 76%, 77%, 78%, 79%, 80%, 81%, 82%, 83%, 84%, 85%, 86%, 87%, 88%, 89%, 90%, 91%, 92%, 93%, 94%, 95%, 96%, 97%, 98%, 99%, or 100% (or any derivable range therein) similar, identical, or homologous with at least, or at most 3, 4, 5, 6, 7, 8, 9, 10, 11, 12, 13, 14, 15, 16, 17, 18, 19, 20, 21, 22, 23, 24, 25, 26, 27, 28, 29, 30, 31, 32, 33, 34, 35, 36, 37, 38, 39, 40, 41, 42, 43, 44, 45, 46, 47, 48, 49, 50, 51, 52, 53, 54, 55, 56, 57, 58, 59, 60, 61, 62, 63, 64, 65, 66, 67, 68, 69, 70, 71, 72, 73, 74, 75, 76, 77, 78, 79, 80, 81, 82, 83, 84, 85, 86, 87, 88, 89, 90, 91, 92, 93, 94, 95, 96, 97, 98, 99, 100, 101, 102, 103, 104, 105, 106, 107, 108, 109, 110, 111, 112, 113, 114, 115, 116, 117, 118, 119, 120, 121, 122, 123, 124, 125, 126, 127, 128, 129, 130, 131, 132, 133, 134, 135, 136, 137, 138, 139, 140, 141, 142, 143, 144, 145, 146, 147, 148, 149, 150, 151, 152, 153, 154, 155, 156, 157, 158, 159, 160, 161, 162, 163, 164, 165, 166, 167, 168, 169, 170, 171, 172, 173, 174, 175, 176, 177, 178, 179, 180, 181, 182, 183, 184, 185, 186, 187, 188, 189, 190, 191, 192, 193, 194, 195, 196, 197, 198, 199, 200, 201, 202, 203, 204, 205, 206, 207, 208, 209, 210, 211, 212, 213, 214, 215, 216, 217, 218, 219, 220, 221, 222, 223, 224, 225, 226, 227, 228, 229, 230, 231, 232, 233, 234, 235, 236, 237, 238, 239, 240, 241, 242, 243, 244, 245, 246, 247, 248, 249, 250, 300, 400, 500, 550, 1000 or more contiguous amino acids or nucleic acids, or any range derivable therein, of SEQ ID NOs1-9.

[0055] In some embodiments, the protein or polypeptide may comprise amino acids 1 to 2, 3, 4, 5, 6, 7, 8, 9, 10, 11, 12, 13, 14, 15, 16, 17, 18, 19, 20, 21, 22, 23, 24, 25, 26, 27, 28, 29, 30, 31, 32, 33, 34, 35, 36, 37, 38, 39, 40, 41, 42, 43, 44, 45, 46, 47, 48, 49, 50, 51, 52, 53, 54, 55, 56, 57, 58, 59, 60, 61, 62, 63, 64, 65, 66, 67, 68, 69, 70, 71, 72, 73, 74, 75, 76, 77, 78, 79, 80, 81, 82, 83, 84, 85, 86, 87, 88, 89, 90, 91, 92, 93, 94, 95, 96, 97, 98, 99, 100, 101, 102, 103, 104, 105, 106, 107, 108, 109, 110, 111, 112, 113, 114, 115, 116, 117, 118, 119, 120, 121, 122, 123, 124, 125, 126, 127, 128, 129, 130, 131, 132, 133, 134, 135, 136, 137, 138, 139, 140, 141, 142, 143, 144, 145, 146, 147, 148, 149, 150, 151, 152, 153, 154, 155, 156, 157, 158, 159, 160, 161, 162, 163, 164, 165, 166, 167, 168, 169, 170, 171, 172, 173, 174, 175, 176, 177, 178, 179, 180, 181, 182, 183, 184, 185, 186, 187, 188, 189, 190, 191, 192, 193, 194, 195, 196, 197, 198, 199, 200, 201, 202, 203, 204, 205, 206, 207, 208, 209, 210, 211, 212, 213, 214, 215, 216, 217, 218, 219, 220, 221, 222, 223, 224, 225, 226, 227, 228, 229, 230, 231, 232, 233, 234, 235, 236, 237, 238, 239, 240, 241, 242, 243, 244, 245, 246, 247, 248, 249, 250, 251, 252, 253, 254, 255, 256, 257, 258, 259, 260, 261, 262, 263, 264, 265, 266, 267, 268, 269, 270, 271, 272, 273, 274, 275, 276, 277, 278, 279, 280, 281, 282, 283, 284, 285, 286, 287, 288, 289, 290, 291, 292, 293, 294, 295, 296, 297, 298, 299, 300, 301, 302, 303, 304, 305, 306, 307, 308, 309, 310, 311, 312, 313, 314, 315, 316, 317, 318, 319, 320, 321, 322, 323, 324, 325, 326, 327, 328, 329, 330, 331, 332, 333, 334, 335, 336, 337, 338, 339, 340, 341, 342, 343, 344, 345, 346, 347, 348, 349, 350, 351, 352, 353, 354, 355, 356, 357, 358, 359, 360, 361, 362, 363, 364, 365, 366, 367, 368, 369, 370, 371, 372, 373, 374, 375, 376, 377, 378, 379, 380, 381, 382, 383, 384, 385, 386, 387, 388, 389, 390, 391, 392, 393, 394, 395, 396, 397, 398, 399, 400, 401, 402, 403, 404, 405, 406, 407, 408, 409, 410, 411, 412, 413, 414, 415, 416, 417, 418, 419, 420, 421, 422, 423, 424, 425, 426, 427, 428, 429, 430, 431, 432, 433, 434, 435, 436, 437, 438, 439, 440, 441, 442, 443, 444, 445, 446, 447, 448, 449, 450, 451, 452, 453, 454, 455, 456, 457, 458, 459, 460, 461, 462, 463, 464, 465, 466, 467, 468, 469, 470, 471, 472, 473, 474, 475, 476, 477, 478, 479, 480, 481, 482, 483, 484, 485, 486, 487, 488, 489, 490, 491, 492, 493, 494, 495, 496, 497, 498, 499, 500, 501, 502, 503, 504, 505, 506, 507, 508, 509, 510, 511, 512, 513, 514, 515, 516, 517, 518, 519, 520, 521, 522, 523, 524, 525, 526, 527, 528, 529, 530, 531, 532, 533, 534, 535, 536, 537, 538, 539, 540, 541, 542, 543, 544, 545, 546, 547, 548, 549, 550, 551, 552, 553, 554, 555, 556, 557, 558, 559, 560, 561, 562, 563, 564, 565, 566, 567, 568, 569, 570, 571, 572, 573, 574, 575, 576, 577, 578, 579, 580, 581, 582, 583, 584, 585, 586, 587, 588, 589, 590, 591, 592, 593, 594, 595, 596, 597, 598, 599, 600, 601, 602, 603, 604, 605, 606, 607, 608, 609, 610, 611, 612, 613, 614, 615, 616, 617, 618, 619, 620, 621, 622, 623, 624, 625, 626, 627, 628, 629, 630, 631, 632, 633, 634, 635, 636, 637, 638, 639, 640, 641, 642, 643, 644, 645, 646, 647, 648, 649, 650, 651, 652, 653, 654, 655, 656, 657, 658, 659, 660, 661, 662, 663, 664, 665, 666, 667, 668, 669, 670, 671, 672, 673, 674, 675, 676, 677, 678, 679, 680, 681, 682, 683, 684, 685, 686, 687, 688, 689, 690, 691, 692, 693, 694, 695, 696, 697, 698, 699, 700, 701, 702, 703, 704, 705, 706, 707, 708, 709, 710, 711, 712, 713, 714, 715, 716, 717, 718, 719, 720, 721, 722, 723, 724, 725, 726, 727, 728, 729, 730, 731, 732, 733, 734, 735, 736, 737, 738, 739, 740, 741, 742, 743, 744, 745, 746, 747, 748, 749, 750, 751, 752, 753, 754, 755, 756, 757, 758, 759, 760, 761, 762, 763, 764, 765, 766, 767, 768, 769, 770, 771, 772, 773, 774, 775, 776, 777, 778, 779, 780, 781, 782, 783, 784, 785, 786, 787, 788, 789, 790, 791, 792, 793, 794, 795, 796, 797, 798, 799, 800, 801, 802, 803, 804, 805, 806, 807, 808, 809, 810, 811, 812, 813, 814, 815, 816, 817, 818, 819, 820, 821, 822, 823, 824, 825, 826, 827, 828, 829, 830, 831, 832, 833, 834, 835, 836, 837, 838, 839, 840, 841, 842, 843, 844, 845, 846, 847, 848, 849, 850, 851, 852, 853, 854, 855, 856, 857, 858, 859, 860, 861, 862, 863, 864, 865, 866, 867, 868, 869, 870, 871, 872, 873, 874, 875, 876, 877, 878, 879, 880, 881, 882, 883, 884, 885, 886, 887, 888, 889, 890, 891, 892, 893, 894, 895, 896, 897, 898, 899, 900, 901, 902, 903, 904, 905, 906, 907, 908, 909, 910, 911, 912, 913, 914, 915, 916, 917, 918, 919, 920, 921, 922, 923, 924, 925, 926, 927, 928, 929, 930, 931, 932, 933, 934, 935, 936, 937, 938, 939, 940, 941, 942, 943, 944, 945, 946, 947, 948, 949, 950, 951, 952, 953, 954, 955, 956, 957, 958, 959, 960, 961, 962, 963, 964, 965, 966, 967, 968, 969, 970, 971, 972, 973, 974, 975, 976, 977, 978, 979, 980, 981, 982, 983, 984, 985, 986, 987, 988, 989, 990, 991, 992, 993, 994, 995, 996, 997, 998, 999, or 1000, (or any derivable range therein) of SEQ ID NOS: 1-9.

[0056] In some embodiments, the protein, polypeptide, or nucleic acid may comprise 1, 2, 3, 4, 5, 6, 7, 8, 9, 10, 11, 12, 13, 14, 15, 16, 17, 18, 19, 20, 21, 22, 23, 24, 25, 26, 27, 28, 29, 30, 31, 32, 33, 34, 35, 36, 37, 38, 39, 40, 41, 42, 43, 44, 45, 46, 47, 48, 49, 50, 51, 52, 53, 54, 55, 56, 57, 58, 59, 60, 61, 62, 63, 64, 65, 66, 67, 68, 69, 70, 71, 72, 73, 74, 75, 76, 77, 78, 79, 80, 81, 82, 83, 84, 85, 86, 87, 88, 89, 90, 91, 92, 93, 94, 95, 96, 97, 98, 99, 100, 101, 102, 103, 104, 105, 106, 107, 108, 109, 110, 111, 112, 113, 114, 115, 116, 117, 118, 119, 120, 121, 122, 123, 124, 125, 126, 127, 128, 129, 130, 131, 132, 133, 134, 135, 136, 137, 138, 139, 140, 141, 142, 143, 144, 145, 146, 147, 148, 149, 150, 151, 152, 153, 154, 155, 156, 157, 158, 159, 160, 161, 162, 163, 164, 165, 166, 167, 168, 169, 170, 171, 172, 173, 174, 175, 176, 177, 178, 179, 180, 181, 182, 183, 184, 185, 186, 187, 188, 189, 190, 191, 192, 193, 194, 195, 196, 197, 198, 199, 200, 201, 202, 203, 204, 205, 206, 207, 208, 209, 210, 211, 212, 213, 214, 215, 216, 217, 218, 219, 220, 221, 222, 223, 224, 225, 226, 227, 228, 229, 230, 231, 232, 233, 234, 235, 236, 237, 238, 239, 240, 241, 242, 243, 244, 245, 246, 247, 248, 249, 250, 251, 252, 253, 254, 255, 256, 257, 258, 259, 260, 261, 262, 263, 264, 265, 266, 267, 268, 269, 270, 271, 272, 273, 274, 275, 276, 277, 278, 279, 280, 281, 282, 283, 284, 285, 286, 287, 288, 289, 290, 291, 292, 293, 294, 295, 296, 297, 298, 299, 300, 301, 302, 303, 304, 305, 306, 307, 308, 309, 310, 311, 312, 313, 314, 315, 316, 317, 318, 319, 320, 321, 322, 323, 324, 325, 326, 327, 328, 329, 330, 331, 332, 333, 334, 335, 336, 337, 338, 339, 340, 341, 342, 343, 344, 345, 346, 347, 348, 349, 350, 351, 352, 353, 354, 355, 356, 357, 358, 359, 360, 361, 362, 363, 364, 365, 366, 367, 368, 369, 370, 371, 372, 373, 374, 375, 376, 377, 378, 379, 380, 381, 382, 383, 384, 385, 386, 387, 388, 389, 390, 391, 392, 393, 394, 395, 396, 397, 398, 399, 400, 401, 402, 403, 404, 405, 406, 407, 408, 409, 410, 411, 412, 413, 414, 415, 416, 417, 418, 419, 420, 421, 422, 423, 424, 425, 426, 427, 428, 429, 430, 431, 432, 433, 434, 435, 436, 437, 438, 439, 440, 441, 442, 443, 444, 445, 446, 447, 448, 449, 450, 451, 452, 453, 454, 455, 456, 457, 458, 459, 460, 461, 462, 463, 464, 465, 466, 467, 468, 469, 470, 471, 472, 473, 474, 475, 476, 477, 478, 479, 480, 481, 482, 483, 484, 485, 486, 487, 488, 489, 490, 491, 492, 493, 494, 495, 496, 497, 498, 499, 500, 501, 502, 503, 504, 505, 506, 507, 508, 509, 510, 511, 512, 513, 514, 515, 516, 517, 518, 519, 520, 521, 522, 523, 524, 525, 526, 527, 528, 529, 530, 531, 532, 533, 534, 535, 536, 537, 538, 539, 540, 541, 542, 543, 544, 545, 546, 547, 548, 549, 550, 551, 552, 553, 554, 555, 556, 557, 558, 559, 560, 561, 562, 563, 564, 565, 566, 567, 568, 569, 570, 571, 572, 573, 574, 575, 576, 577, 578, 579, 580, 581, 582, 583, 584, 585, 586, 587, 588, 589, 590, 591, 592, 593, 594, 595, 596, 597, 598, 599, 600, 601, 602, 603, 604, 605, 606, 607, 608, 609, 610, 611, 612, 613, 614, 615, 616, 617, 618, 619, 620, 621, 622, 623, 624, 625, 626, 627, 628, 629, 630, 631, 632, 633, 634, 635, 636, 637, 638, 639, 640, 641, 642, 643, 644, 645, 646, 647, 648, 649, 650, 651, 652, 653, 654, 655, 656, 657, 658, 659, 660, 661, 662, 663, 664, 665, 666, 667, 668, 669, 670, 671, 672, 673, 674, 675, 676, 677, 678, 679, 680, 681, 682, 683, 684, 685, 686, 687, 688, 689, 690, 691, 692, 693, 694, 695, 696, 697, 698, 699, 700, 701, 702, 703, 704, 705, 706, 707, 708, 709, 710, 711, 712, 713, 714, 715, 716, 717, 718, 719, 720, 721, 722, 723, 724, 725, 726, 727, 728, 729, 730, 731, 732, 733, 734, 735, 736, 737, 738, 739, 740, 741, 742, 743, 744, 745, 746, 747, 748, 749, 750, 751, 752, 753, 754, 755, 756, 757, 758, 759, 760, 761, 762, 763, 764, 765, 766, 767, 768, 769, 770, 771, 772, 773, 774, 775, 776, 777, 778, 779, 780, 781, 782, 783, 784, 785, 786, 787, 788, 789, 790, 791, 792, 793, 794, 795, 796, 797, 798, 799, 800, 801, 802, 803, 804, 805, 806, 807, 808, 809, 810, 811, 812, 813, 814, 815, 816, 817, 818, 819, 820, 821, 822, 823, 824, 825, 826, 827, 828, 829, 830, 831, 832, 833, 834, 835, 836, 837, 838, 839, 840, 841, 842, 843, 844, 845, 846, 847, 848, 849, 850, 851, 852, 853, 854, 855, 856, 857, 858, 859, 860, 861, 862, 863, 864, 865, 866, 867, 868, 869, 870, 871, 872, 873, 874, 875, 876, 877, 878, 879, 880, 881, 882, 883, 884, 885, 886, 887, 888, 889, 890, 891, 892, 893, 894, 895, 896, 897, 898, 899, 900, 901, 902, 903, 904, 905, 906, 907, 908, 909, 910, 911, 912, 913, 914, 915, 916, 917, 918, 919, 920, 921, 922, 923, 924, 925, 926, 927, 928, 929, 930, 931, 932, 933, 934, 935, 936, 937, 938, 939, 940, 941, 942, 943, 944, 945, 946, 947, 948, 949, 950, 951, 952, 953, 954, 955, 956, 957, 958, 959, 960, 961, 962, 963, 964, 965, 966, 967, 968, 969, 970, 971, 972, 973, 974, 975, 976, 977, 978, 979, 980, 981, 982, 983, 984, 985, 986, 987, 988, 989, 990, 991, 992, 993, 994, 995, 996, 997, 998, 999, or 1000, (or any derivable range therein) contiguous amino acids of SEQ ID NOS: 1-9.

[0057] In some embodiments, the polypeptide, protein, or nucleic acid may comprise at least, at most, or exactly 1, 2, 3, 4, 5, 6, 7, 8, 9, 10, 11, 12, 13, 14, 15, 16, 17, 18, 19, 20, 21, 22, 23, 24, 25, 26, 27, 28, 29, 30, 31, 32, 33, 34, 35, 36, 37, 38, 39, 40, 41, 42, 43, 44, 45, 46, 47, 48, 49, 50, 51, 52, 53, 54, 55, 56, 57, 58, 59, 60, 61, 62, 63, 64, 65, 66, 67, 68, 69, 70, 71, 72, 73, 74, 75, 76, 77, 78, 79, 80, 81, 82, 83, 84, 85, 86, 87, 88, 89, 90, 91, 92, 93, 94, 95, 96, 97, 98, 99, 100, 101, 102, 103, 104, 105, 106, 107, 108, 109, 110, 111, 112, 113, 114, 115, 116, 117, 118, 119, 120, 121, 122, 123, 124, 125, 126, 127, 128, 129, 130, 131, 132, 133, 134, 135, 136, 137, 138, 139, 140, 141, 142, 143, 144, 145, 146, 147, 148, 149, 150, 151, 152, 153, 154, 155, 156, 157, 158, 159, 160, 161, 162, 163, 164, 165, 166, 167, 168, 169, 170, 171, 172, 173, 174, 175, 176, 177, 178, 179, 180, 181, 182, 183, 184, 185, 186, 187, 188, 189, 190, 191, 192, 193, 194, 195, 196, 197, 198, 199, 200, 201, 202, 203, 204, 205, 206, 207, 208, 209, 210, 211, 212, 213, 214, 215, 216, 217, 218, 219, 220, 221, 222, 223, 224, 225, 226, 227, 228, 229, 230, 231, 232, 233, 234, 235, 236, 237, 238, 239, 240, 241, 242, 243, 244, 245, 246, 247, 248, 249, 250, 251, 252, 253, 254, 255, 256, 257, 258, 259, 260, 261, 262, 263, 264, 265, 266, 267, 268, 269, 270, 271, 272, 273, 274, 275, 276, 277, 278, 279, 280, 281, 282, 283, 284, 285, 286, 287, 288, 289, 290, 291, 292, 293, 294, 295, 296, 297, 298, 299, 300, 301, 302, 303, 304, 305, 306, 307, 308, 309, 310, 311, 312, 313, 314, 315, 316, 317, 318, 319, 320, 321, 322, 323, 324, 325, 326, 327, 328, 329, 330, 331, 332, 333, 334, 335, 336, 337, 338, 339, 340, 341, 342, 343, 344, 345, 346, 347, 348, 349, 350, 351, 352, 353, 354, 355, 356, 357, 358, 359, 360, 361, 362, 363, 364, 365, 366, 367, 368, 369, 370, 371, 372, 373, 374, 375, 376, 377, 378, 379, 380, 381, 382, 383, 384, 385, 386, 387, 388, 389, 390, 391, 392, 393, 394, 395, 396, 397, 398, 399, 400, 401, 402, 403, 404, 405, 406, 407, 408, 409, 410, 411, 412, 413, 414, 415, 416, 417, 418, 419, 420, 421, 422, 423, 424, 425, 426, 427, 428, 429, 430, 431, 432, 433, 434, 435, 436, 437, 438, 439, 440, 441, 442, 443, 444, 445, 446, 447, 448, 449, 450, 451, 452, 453, 454, 455, 456, 457, 458, 459, 460, 461, 462, 463, 464, 465, 466, 467, 468, 469, 470, 471, 472, 473, 474, 475, 476, 477, 478, 479, 480, 481, 482, 483, 484, 485, 486, 487, 488, 489, 490, 491, 492, 493, 494, 495, 496, 497, 498, 499, 500, 501, 502, 503, 504, 505, 506, 507, 508, 509, 510, 511, 512, 513, 514, 515, 516, 517, 518, 519, 520, 521, 522, 523, 524, 525, 526, 527, 528, 529, 530, 531, 532, 533, 534, 535, 536, 537, 538, 539, 540, 541, 542, 543, 544, 545, 546, 547, 548, 549, 550, 551, 552, 553, 554, 555, 556, 557, 558, 559, 560, 561, 562, 563, 564, 565, 566, 567, 568, 569, 570, 571, 572, 573, 574, 575, 576, 577, 578, 579, 580, 581, 582, 583, 584, 585, 586, 587, 588, 589, 590, 591, 592, 593, 594, 595, 596, 597, 598, 599, 600, 601, 602, 603, 604, 605, 606, 607, 608, 609, 610, 611, 612, 613, 614, 615, 616, 617, 618, 619, 620, 621, 622, 623, 624, 625, 626, 627, 628, 629, 630, 631, 632, 633, 634, 635, 636, 637, 638, 639, 640, 641, 642, 643, 644, 645, 646, 647, 648, 649, 650, 651, 652, 653, 654, 655, 656, 657, 658, 659, 660, 661, 662, 663, 664, 665, 666, 667, 668, 669, 670, 671, 672, 673, 674, 675, 676, 677, 678, 679, 680, 681, 682, 683, 684, 685, 686, 687, 688, 689, 690, 691, 692, 693, 694, 695, 696, 697, 698, 699, 700, 701, 702, 703, 704, 705, 706, 707, 708, 709, 710, 711, 712, 713, 714, 715, 716, 717, 718, 719, 720, 721, 722, 723, 724, 725, 726, 727, 728, 729, 730, 731, 732, 733, 734, 735, 736, 737, 738, 739, 740, 741, 742, 743, 744, 745, 746, 747, 748, 749, 750, 751, 752, 753, 754, 755, 756, 757, 758, 759, 760, 761, 762, 763, 764, 765, 766, 767, 768, 769, 770, 771, 772, 773, 774, 775, 776, 777, 778, 779, 780, 781, 782, 783, 784, 785, 786, 787, 788, 789, 790, 791, 792, 793, 794, 795, 796, 797, 798, 799, 800, 801, 802, 803, 804, 805, 806, 807, 808, 809, 810, 811, 812, 813, 814, 815, 816, 817, 818, 819, 820, 821, 822, 823, 824, 825, 826, 827, 828, 829, 830, 831, 832, 833, 834, 835, 836, 837, 838, 839, 840, 841, 842, 843, 844, 845, 846, 847, 848, 849, 850, 851, 852, 853, 854, 855, 856, 857, 858, 859, 860, 861, 862, 863, 864, 865, 866, 867, 868, 869, 870, 871, 872, 873, 874, 875, 876, 877, 878, 879, 880, 881, 882, 883, 884, 885, 886, 887, 888, 889, 890, 891, 892, 893, 894, 895, 896, 897, 898, 899, 900, 901, 902, 903, 904, 905, 906, 907, 908, 909, 910, 911, 912, 913, 914, 915, 916, 917, 918, 919, 920, 921, 922, 923, 924, 925, 926, 927, 928, 929, 930, 931, 932, 933, 934, 935, 936, 937, 938, 939, 940, 941, 942, 943, 944, 945, 946, 947, 948, 949, 950, 951, 952, 953, 954, 955, 956, 957, 958, 959, 960, 961, 962, 963, 964, 965, 966, 967, 968, 969, 970, 971, 972, 973, 974, 975, 976, 977, 978, 979, 980, 981, 982, 983, 984, 985, 986, 987, 988, 989, 990, 991, 992, 993, 994, 995, 996, 997, 998, 999, or 1000 (or any derivable range therein) contiguous amino acids of SEQ ID NOS: 1-9 that are at least, at most, or exactly 60%, 61%, 62%, 63%, 64%, 65%, 66%, 67%, 68%, 69%, 70%, 71%, 72%, 73%, 74%, 75%, 76%, 77%, 78%, 79%, 80%, 81%, 82%, 83%, 84%, 85%, 86%, 87%, 88%, 89%, 90%, 91%, 92%, 93%, 94%, 95%, 96%, 97%, 98%, 99%, or 100% (or any derivable range therein) similar, identical, or homologous with one of SEQ ID NOS: 1-9.

[0058] In some aspects there is a nucleic acid molecule or polypeptide starting at position 1, 2, 3, 4, 5, 6, 7, 8, 9, 10, 11, 12, 13, 14, 15, 16, 17, 18, 19, 20, 21, 22, 23, 24, 25, 26, 27, 28, 29, 30, 31, 32, 33, 34, 35, 36, 37, 38, 39, 40, 41, 42, 43, 44, 45, 46, 47, 48, 49, 50, 51, 52, 53, 54, 55, 56, 57, 58, 59, 60, 61, 62, 63, 64, 65, 66, 67, 68, 69, 70, 71, 72, 73, 74, 75, 76, 77, 78, 79, 80, 81, 82, 83, 84, 85, 86, 87, 88, 89, 90, 91, 92, 93, 94, 95, 96, 97, 98, 99, 100, 101, 102, 103, 104, 105, 106, 107, 108, 109, 110, 111, 112, 113, 114, 115, 116, 117, 118, 119, 120, 121, 122, 123, 124, 125, 126, 127, 128, 129, 130, 131, 132, 133, 134, 135, 136, 137, 138, 139, 140, 141, 142, 143, 144, 145, 146, 147, 148, 149, 150, 151, 152, 153, 154, 155, 156, 157, 158, 159, 160, 161, 162, 163, 164, 165, 166, 167, 168, 169, 170, 171, 172, 173, 174, 175, 176, 177, 178, 179, 180, 181, 182, 183, 184, 185, 186, 187, 188, 189, 190, 191, 192, 193, 194, 195, 196, 197, 198, 199, 200, 201, 202, 203, 204, 205, 206, 207, 208, 209, 210, 211, 212, 213, 214, 215, 216, 217, 218, 219, 220, 221, 222, 223, 224, 225, 226, 227, 228, 229, 230, 231, 232, 233, 234, 235, 236, 237, 238, 239, 240, 241, 242, 243, 244, 245, 246, 247, 248, 249, 250, 251, 252, 253, 254, 255, 256, 257, 258, 259, 260, 261, 262, 263, 264, 265, 266, 267, 268, 269, 270, 271, 272, 273, 274, 275, 276, 277, 278, 279, 280, 281, 282, 283, 284, 285, 286, 287, 288, 289, 290, 291, 292, 293, 294, 295, 296, 297, 298, 299, 300, 301, 302, 303, 304, 305, 306, 307, 308, 309, 310, 311, 312, 313, 314, 315, 316, 317, 318, 319, 320, 321, 322, 323, 324, 325, 326, 327, 328, 329, 330, 331, 332, 333, 334, 335, 336, 337, 338, 339, 340, 341, 342, 343, 344, 345, 346, 347, 348, 349, 350, 351, 352, 353, 354, 355, 356, 357, 358, 359, 360, 361, 362, 363, 364, 365, 366, 367, 368, 369, 370, 371, 372, 373, 374, 375, 376, 377, 378, 379, 380, 381, 382, 383, 384, 385, 386, 387, 388, 389, 390, 391, 392, 393, 394, 395, 396, 397, 398, 399, 400, 401, 402, 403, 404, 405, 406, 407, 408, 409, 410, 411, 412, 413, 414, 415, 416, 417, 418, 419, 420, 421, 422, 423, 424, 425, 426, 427, 428, 429, 430, 431, 432, 433, 434, 435, 436, 437, 438, 439, 440, 441, 442, 443, 444, 445, 446, 447, 448, 449, 450, 451, 452, 453, 454, 455, 456, 457, 458, 459, 460, 461, 462, 463, 464, 465, 466, 467, 468, 469, 470, 471, 472, 473, 474, 475, 476, 477, 478, 479, 480, 481, 482, 483, 484, 485, 486, 487, 488, 489, 490, 491, 492, 493, 494, 495, 496, 497, 498, 499, 500, 501, 502, 503, 504, 505, 506, 507, 508, 509, 510, 511, 512, 513, 514, 515, 516, 517, 518, 519, 520, 521, 522, 523, 524, 525, 526, 527, 528, 529, 530, 531, 532, 533, 534, 535, 536, 537, 538, 539, 540, 541, 542, 543, 544, 545, 546, 547, 548, 549, 550, 551, 552, 553, 554, 555, 556, 557, 558, 559, 560, 561, 562, 563, 564, 565, 566, 567, 568, 569, 570, 571, 572, 573, 574, 575, 576, 577, 578, 579, 580, 581, 582, 583, 584, 585, 586, 587, 588, 589, 590, 591, 592, 593, 594, 595, 596, 597, 598, 599, 600, 601, 602, 603, 604, 605, 606, 607, 608, 609, 610, 611, 612, 613, 614, 615, 616, 617, 618, 619, 620, 621, 622, 623, 624, 625, 626, 627, 628, 629, 630, 631, 632, 633, 634, 635, 636, 637, 638, 639, 640, 641, 642, 643, 644, 645, 646, 647, 648, 649, 650, 651, 652, 653, 654, 655, 656, 657, 658, 659, 660, 661, 662, 663, 664, 665, 666, 667, 668, 669, 670, 671, 672, 673, 674, 675, 676, 677, 678, 679, 680, 681, 682, 683, 684, 685, 686, 687, 688, 689, 690, 691, 692, 693, 694, 695, 696, 697, 698, 699, 700, 701, 702, 703, 704, 705, 706, 707, 708, 709, 710, 711, 712, 713, 714, 715, 716, 717, 718, 719, 720, 721, 722, 723, 724, 725, 726, 727, 728, 729, 730, 731, 732, 733, 734, 735, 736, 737, 738, 739, 740, 741, 742, 743, 744, 745, 746, 747, 748, 749, 750, 751, 752, 753, 754, 755, 756, 757, 758, 759, 760, 761, 762, 763, 764, 765, 766, 767, 768, 769, 770, 771, 772, 773, 774, 775, 776, 777, 778, 779, 780, 781, 782, 783, 784, 785, 786, 787, 788, 789, 790, 791, 792, 793, 794, 795, 796, 797, 798, 799, 800, 801, 802, 803, 804, 805, 806, 807, 808, 809, 810, 811, 812, 813, 814, 815, 816, 817, 818, 819, 820, 821, 822, 823, 824, 825, 826, 827, 828, 829, 830, 831, 832, 833, 834, 835, 836, 837, 838, 839, 840, 841, 842, 843, 844, 845, 846, 847, 848, 849, 850, 851, 852, 853, 854, 855, 856, 857, 858, 859, 860, 861, 862, 863, 864, 865, 866, 867, 868, 869, 870, 871, 872, 873, 874, 875, 876, 877, 878, 879, 880, 881, 882, 883, 884, 885, 886, 887, 888, 889, 890, 891, 892, 893, 894, 895, 896, 897, 898, 899, 900, 901, 902, 903, 904, 905, 906, 907, 908, 909, 910, 911, 912, 913, 914, 915, 916, 917, 918, 919, 920, 921, 922, 923, 924, 925, 926, 927, 928, 929, 930, 931, 932, 933, 934, 935, 936, 937, 938, 939, 940, 941, 942, 943, 944, 945, 946, 947, 948, 949, 950, 951, 952, 953, 954, 955, 956, 957, 958, 959, 960, 961, 962, 963, 964, 965, 966, 967, 968, 969, 970, 971, 972, 973, 974, 975, 976, 977, 978, 979, 980, 981, 982, 983, 984, 985, 986, 987, 988, 989, 990, 991, 992, 993, 994, 995, 996, 997, 998, 999, or 1000 of any of SEQ ID NOS: 1-9 and comprising at least, at most, or exactly 2, 3, 4, 5, 6, 7, 8, 9, 10, 11, 12, 13, 14, 15, 16, 17, 18, 19, 20, 21, 22, 23, 24, 25, 26, 27, 28, 29, 30, 31, 32, 33, 34, 35, 36, 37, 38, 39, 40, 41, 42, 43, 44, 45, 46, 47, 48, 49, 50, 51, 52, 53, 54, 55, 56, 57, 58, 59, 60, 61, 62, 63, 64, 65, 66, 67, 68, 69, 70, 71, 72, 73, 74, 75, 76, 77, 78, 79, 80, 81, 82, 83, 84, 85, 86, 87, 88, 89, 90, 91, 92, 93, 94, 95, 96, 97, 98, 99, 100, 101, 102, 103, 104, 105, 106, 107, 108, 109, 110, 111, 112, 113, 114, 115, 116, 117, 118, 119, 120, 121, 122, 123, 124, 125, 126, 127, 128, 129, 130, 131, 132, 133, 134, 135, 136, 137, 138, 139, 140, 141, 142, 143, 144, 145, 146, 147, 148, 149, 150, 151, 152, 153, 154, 155, 156, 157, 158, 159, 160, 161, 162, 163, 164, 165, 166, 167, 168, 169, 170, 171, 172, 173, 174, 175, 176, 177, 178, 179, 180, 181, 182, 183, 184, 185, 186, 187, 188, 189, 190, 191, 192, 193, 194, 195, 196, 197, 198, 199, 200, 201, 202, 203, 204, 205, 206, 207, 208, 209, 210, 211, 212, 213, 214, 215, 216, 217, 218, 219, 220, 221, 222, 223, 224, 225, 226, 227, 228, 229, 230, 231, 232, 233, 234, 235, 236, 237, 238, 239, 240, 241, 242, 243, 244, 245, 246, 247, 248, 249, 250, 251, 252, 253, 254, 255, 256, 257, 258, 259, 260, 261, 262, 263, 264, 265, 266, 267, 268, 269, 270, 271, 272, 273, 274, 275, 276, 277, 278, 279, 280, 281, 282, 283, 284, 285, 286, 287, 288, 289, 290, 291, 292, 293, 294, 295, 296, 297, 298, 299, 300, 301, 302, 303, 304, 305, 306, 307, 308, 309, 310, 311, 312, 313, 314, 315, 316, 317, 318, 319, 320, 321, 322, 323, 324, 325, 326, 327, 328, 329, 330, 331, 332, 333, 334, 335, 336, 337, 338, 339, 340, 341, 342, 343, 344, 345, 346, 347, 348, 349, 350, 351, 352, 353, 354, 355, 356, 357, 358, 359, 360, 361, 362, 363, 364, 365, 366, 367, 368, 369, 370, 371, 372, 373, 374, 375, 376, 377, 378, 379, 380, 381, 382, 383, 384, 385, 386, 387, 388, 389, 390, 391, 392, 393, 394, 395, 396, 397, 398, 399, 400, 401, 402, 403, 404, 405, 406, 407, 408, 409, 410, 411, 412, 413, 414, 415, 416, 417, 418, 419, 420, 421, 422, 423, 424, 425, 426, 427, 428, 429, 430, 431, 432, 433, 434, 435, 436, 437, 438, 439, 440, 441, 442, 443, 444, 445, 446, 447, 448, 449, 450, 451, 452, 453, 454, 455, 456, 457, 458, 459, 460, 461, 462, 463, 464, 465, 466, 467, 468, 469, 470, 471, 472, 473, 474, 475, 476, 477, 478, 479, 480, 481, 482, 483, 484, 485, 486, 487, 488, 489, 490, 491, 492, 493, 494, 495, 496, 497, 498, 499, 500, 501, 502, 503, 504, 505, 506, 507, 508, 509, 510, 511, 512, 513, 514, 515, 516, 517, 518, 519, 520, 521, 522, 523, 524, 525, 526, 527, 528, 529, 530, 531, 532, 533, 534, 535, 536, 537, 538, 539, 540, 541, 542, 543, 544, 545, 546, 547, 548, 549, 550, 551, 552, 553, 554, 555, 556, 557, 558, 559, 560, 561, 562, 563, 564, 565, 566, 567, 568, 569, 570, 571, 572, 573, 574, 575, 576, 577, 578, 579, 580, 581, 582, 583, 584, 585, 586, 587, 588, 589, 590, 591, 592, 593, 594, 595, 596, 597, 598, 599, 600, 601, 602, 603, 604, 605, 606, 607, 608, 609, 610, 611, 612, 613, 614, 615, 616, 617, 618, 619, 620, 621, 622, 623, 624, 625, 626, 627, 628, 629, 630, 631, 632, 633, 634, 635, 636, 637, 638, 639, 640, 641, 642, 643, 644, 645, 646, 647, 648, 649, 650, 651, 652, 653, 654, 655, 656, 657, 658, 659, 660, 661, 662, 663, 664, 665, 666, 667, 668, 669, 670, 671, 672, 673, 674, 675, 676, 677, 678, 679, 680, 681, 682, 683, 684, 685, 686, 687, 688, 689, 690, 691, 692, 693, 694, 695, 696, 697, 698, 699, 700, 701, 702, 703, 704, 705, 706, 707, 708, 709, 710, 711, 712, 713, 714, 715, 716, 717, 718, 719, 720, 721, 722, 723, 724, 725, 726, 727, 728, 729, 730, 731, 732, 733, 734, 735, 736, 737, 738, 739, 740, 741, 742, 743, 744, 745, 746, 747, 748, 749, 750, 751, 752, 753, 754, 755, 756, 757, 758, 759, 760, 761, 762, 763, 764, 765, 766, 767, 768, 769, 770, 771, 772, 773, 774, 775, 776, 777, 778, 779, 780, 781, 782, 783, 784, 785, 786, 787, 788, 789, 790, 791, 792, 793, 794, 795, 796, 797, 798, 799, 800, 801, 802, 803, 804, 805, 806, 807, 808, 809, 810, 811, 812, 813, 814, 815, 816, 817, 818, 819, 820, 821, 822, 823, 824, 825, 826, 827, 828, 829, 830, 831, 832, 833, 834, 835, 836, 837, 838, 839, 840, 841, 842, 843, 844, 845, 846, 847, 848, 849, 850, 851, 852, 853, 854, 855, 856, 857, 858, 859, 860, 861, 862, 863, 864, 865, 866, 867, 868, 869, 870, 871, 872, 873, 874, 875, 876, 877, 878, 879, 880, 881, 882, 883, 884, 885, 886, 887, 888, 889, 890, 891, 892, 893, 894, 895, 896, 897, 898, 899, 900, 901, 902, 903, 904, 905, 906, 907, 908, 909, 910, 911, 912, 913, 914, 915, 916, 917, 918, 919, 920, 921, 922, 923, 924, 925, 926, 927, 928, 929, 930, 931, 932, 933, 934, 935, 936, 937, 938, 939, 940, 941, 942, 943, 944, 945, 946, 947, 948, 949, 950, 951, 952, 953, 954, 955, 956, 957, 958, 959, 960, 961, 962, 963, 964, 965, 966, 967, 968, 969, 970, 971, 972, 973, 974, 975, 976, 977, 978, 979, 980, 981, 982, 983, 984, 985, 986, 987, 988, 989, 990, 991, 992, 993, 994, 995, 996, 997, 998, 999, or 1000 (or any derivable range therein) contiguous amino acids or nucleotides of any of SEQ ID NOS: 1-9.

[0059] The nucleotide as well as the protein, polypeptide, and peptide sequences for cdtR have been previously disclosed, and may be found in the recognized computerized databases. Two commonly used databases are the National Center for Biotechnology Information's Genbank and GenPept databases (on the World Wide Web at ncbi.nlm.nih.gov/) and The Universal Protein Resource (UniProt; on the World Wide Web at uniprot.org). The coding regions for these genes may be amplified and/or expressed using the techniques disclosed herein or as would be known to those of ordinary skill in the art.

[0060] It is contemplated that in compositions of the disclosure, there is between about 0.001 mg and about 10 mg of total polypeptide, peptide, protein, nucleic acid per mL. The concentration of protein in a composition can be about, at least about or at most about 0.001, 0.010, 0.050, 0.1, 0.2, 0.3, 0.4, 0.5, 0.6, 0.7, 0.8, 0.9, 1.0, 1.5, 2.0, 2.5, 3.0, 3.5, 4.0, 4.5, 5.0, 5.5, 6.0, 6.5, 7.0, 7.5, 8.0, 8.5, 9.0, 9.5, 10.0 mg/mL or more (or any range derivable therein).

### 1. Variant Polypeptides

[0061] The following is a discussion of changing the amino acid subunits of a protein to create an equivalent, or even improved, second-generation variant polypeptide or peptide. For example, certain amino acids may be substituted for other amino acids in a protein or polypeptide sequence with or without appreciable loss of interactive binding capacity with structures such as, for example, antigen-binding regions of antibodies or binding sites on substrate molecules. Since it is the interactive capacity and nature of a protein that defines that protein's functional activity, certain amino acid substitutions can be made in a protein sequence and in its corresponding DNA coding sequence, and nevertheless produce a protein with similar or desirable properties. It is thus contemplated by the inventors that various changes may be made in the DNA sequences of genes which encode proteins without appreciable loss of their biological utility or activity.

[0062] The term “functionally equivalent codon” is used herein to refer to codons that encode the same amino acid, such as the six different codons for arginine. Also considered are “neutral substitutions” or “neutral mutations” which refers to a change in the codon or codons that encode biologically equivalent amino acids.

[0063] Amino acid sequence variants of the disclosure can be substitutional, insertional, or deletion variants. A variation in a polypeptide of the disclosure may affect 1, 2, 3, 4, 5, 6, 7, 8, 9, 10, 11, 12, 13, 14, 15, 16, 17, 18, 19, 20, 21, 22, 23, 24, 25, 26, 27, 28, 29, 30, 31, 32, 33, 34, 35, 36, 37, 38, 39, 40, 41, 42, 43, 44, 45, 46, 47, 48, 49, 50, or more non-contiguous or contiguous amino acids of the protein or polypeptide, as compared to wild-type. A variant can comprise an amino acid sequence that is at least 50%, 60%, 70%, 80%, or 90%, including all values and ranges there between, identical to any sequence provided or referenced herein. A variant can include 1, 2, 3, 4, 5, 6, 7, 8, 9, 10, 11, 12, 13, 14, 15, 16, 17, 18, 19, 20, or more substitute amino acids.

[0064] It also will be understood that amino acid and nucleic acid sequences may include additional residues, such as additional N- or C-terminal amino acids, or 5′ or 3′ sequences, respectively, and yet still be essentially identical as set forth in one of the sequences disclosed herein, so long as the sequence meets the criteria set forth above, including the maintenance of biological protein activity where protein expression is concerned. The addition of terminal sequences particularly applies to nucleic acid sequences that may, for example, include various non-coding sequences flanking either of the 5′ or 3′ portions of the coding region.

[0065] Deletion variants typically lack one or more residues of the native or wild type protein. Individual residues can be deleted or a number of non-contiguous or contiguous amino acids can be deleted, such as 1, 2, 3, 4, 5, 6, 7, 8, 9, 10, 11, 12, 13, 14, 15, 16, 17, 18, 19, 20, 21, 22, 23, 24, 25, 26, 27, 28, 29, 30, 31, 32, 33, 34, 35, 36, 37, 38, 39, 40, 41, 42, 43, 44, 45, 46, 47, 48, 49, 50, or more non-contiguous or contiguous amino acids. A stop codon may be introduced (by substitution or insertion) into an encoding nucleic acid sequence to generate a truncated protein.

[0066] Insertional mutants typically involve the addition of amino acid residues at a non-terminal point in the polypeptide. This may include the insertion of one or more amino acid residues. Terminal additions may also be generated and can include fusion proteins which are multimers or concatemers of one or more peptides or polypeptides described or referenced herein.

[0067] Substitutional variants typically contain the exchange of one amino acid for another at one or more sites within the protein or polypeptide, and may be designed to modulate one or more properties of the polypeptide, with or without the loss of other functions or properties. Substitutions may be conservative, that is, one amino acid is replaced with one of similar chemical properties. “Conservative amino acid substitutions” may involve exchange of a member of one amino acid class with another member of the same class. Conservative substitutions are well known in the art and include, for example, the changes of: alanine to serine; arginine to lysine; asparagine to glutamine or histidine; aspartate to glutamate; cysteine to serine; glutamine to asparagine; glutamate to aspartate; glycine to proline; histidine to asparagine or glutamine; isoleucine to leucine or valine; leucine to valine or isoleucine; lysine to arginine; methionine to leucine or isoleucine; phenylalanine to tyrosine, leucine or methionine; serine to threonine; threonine to serine; tryptophan to tyrosine; tyrosine to tryptophan or phenylalanine; and valine to isoleucine or leucine. Conservative amino acid substitutions may encompass non-naturally occurring amino acid residues, which are typically incorporated by chemical peptide synthesis rather than by synthesis in biological systems. These include peptidomimetics or other reversed or inverted forms of amino acid moieties.

[0068] Alternatively, substitutions may be “non-conservative”, such that a function or activity of the polypeptide is affected. Non-conservative changes typically involve substituting an amino acid residue with one that is chemically dissimilar, such as a polar or charged amino acid for a nonpolar or uncharged amino acid, and vice versa. Non-conservative substitutions may involve the exchange of a member of one of the amino acid classes for a member from another class.

### 2. Considerations for Substitutions

[0069] One skilled in the art can determine suitable variants of polypeptides as set forth herein using well-known techniques. One skilled in the art may identify suitable areas of the molecule that may be changed without destroying activity by targeting regions not believed to be important for activity. The skilled artisan will also be able to identify amino acid residues and portions of the molecules that are conserved among similar proteins or polypeptides. In further embodiments, areas that may be important for biological activity or for structure may be subject to conservative amino acid substitutions without significantly altering the biological activity or without adversely affecting the protein or polypeptide structure.

[0070] In making such changes, the hydropathy index of amino acids may be considered. The hydropathy profile of a protein is calculated by assigning each amino acid a numerical value (“hydropathy index”) and then repetitively averaging these values along the peptide chain. Each amino acid has been assigned a value based on its hydrophobicity and charge characteristics. They are: isoleucine (+4.5); valine (+4.2); leucine (+3.8); phenylalaninc (+2.8); cysteine/cysteine (+2.5); methionine (+1.9); alanine (+1.8); glycine (−0.4); threonine (−0.7); serine (−0.8); tryptophan (−0.9); tyrosine (−1.3); proline (1.6); histidine (−3.2); glutamate (−3.5); glutamine (−3.5); aspartate (−3.5); asparagine (−3.5); lysine (−3.9); and arginine (−4.5). The importance of the hydropathy amino acid index in conferring interactive biologic function on a protein is generally understood in the art (Kyte et al., J. Mol. Biol. 157:105-131 (1982)). It is accepted that the relative hydropathic character of the amino acid contributes to the secondary structure of the resultant protein or polypeptide, which in turn defines the interaction of the protein or polypeptide with other molecules, for example, enzymes, substrates, receptors, DNA, antibodies, antigens, and others. It is also known that certain amino acids may be substituted for other amino acids having a similar hydropathy index or score, and still retain a similar biological activity. In making changes based upon the hydropathy index, in certain embodiments, the substitution of amino acids whose hydropathy indices are within +2 is included. In some aspects of the present disclosure, those that are within +1 are included, and in other aspects of the present disclosure, those within +0.5 are included.

[0071] It also is understood in the art that the substitution of like amino acids can be effectively made based on hydrophilicity. U.S. Pat. No. 4,554,101, incorporated herein by reference, states that the greatest local average hydrophilicity of a protein, as governed by the hydrophilicity of its adjacent amino acids, correlates with a biological property of the protein. In certain embodiments, the greatest local average hydrophilicity of a protein, as governed by the hydrophilicity of its adjacent amino acids, correlates with its immunogenicity and antigen binding, that is, as a biological property of the protein. The following hydrophilicity values have been assigned to these amino acid residues: arginine (+3.0); lysine (+3.0); aspartate (+3.0±1); glutamate (+3.0±1); serine (+0.3); asparagine (+0.2); glutamine (+0.2); glycine (0); threonine (−0.4); proline (−0.5+1); alanine (−0.5); histidine (−0.5); cysteine (−1.0); methionine (−1.3); valine (−1.5); leucine (−1.8); isoleucine (−1.8); tyrosine (−2.3); phenylalanine (−2.5); and tryptophan (−3.4). In making changes based upon similar hydrophilicity values, in certain embodiments, the substitution of amino acids whose hydrophilicity values are within +2 are included, in other embodiments, those which are within +1 are included, and in still other embodiments, those within +0.5 are included. In some instances, one may also identify epitopes from primary amino acid sequences based on hydrophilicity. These regions are also referred to as “epitopic core regions.” It is understood that an amino acid can be substituted for another having a similar hydrophilicity value and still produce a biologically equivalent and immunologically equivalent protein.

[0072] Additionally, one skilled in the art can review structure-function studies identifying residues in similar polypeptides or proteins that are important for activity or structure. In view of such a comparison, one can predict the importance of amino acid residues in a protein that correspond to amino acid residues important for activity or structure in similar proteins. One skilled in the art may opt for chemically similar amino acid substitutions for such predicted important amino acid residues.

[0073] One skilled in the art can also analyze the three-dimensional structure and amino acid sequence in relation to that structure in similar proteins or polypeptides. In view of such information, one skilled in the art may predict the alignment of amino acid residues of an antibody with respect to its three-dimensional structure. One skilled in the art may choose not to make changes to amino acid residues predicted to be on the surface of the protein, since such residues may be involved in important interactions with other molecules. Moreover, one skilled in the art may generate test variants containing a single amino acid substitution at each desired amino acid residue. These variants can then be screened using standard assays for binding and/or activity, thus yielding information gathered from such routine experiments, which may allow one skilled in the art to determine the amino acid positions where further substitutions should be avoided either alone or in combination with other mutations. Various tools available to determine secondary structure can be found on the world wide web at expasy.org/proteomics/protein_structure.

[0074] In some embodiments of the disclosure, amino acid substitutions are made that: (1) reduce susceptibility to proteolysis, (2) reduce susceptibility to oxidation, (3) alter binding affinity for forming protein complexes, (4) alter ligand or antigen binding affinities, and/or (5) confer or modify other physicochemical or functional properties on such polypeptides. For example, single or multiple amino acid substitutions (in certain embodiments, conservative amino acid substitutions) may be made in the naturally occurring sequence. Substitutions can be made in that portion of the antibody that lies outside the domain(s) forming intermolecular contacts. In such embodiments, conservative amino acid substitutions can be used that do not substantially change the structural characteristics of the protein or polypeptide (e.g., one or more replacement amino acids that do not disrupt the secondary structure that characterizes the native antibody).

### II. Formulations and Culture of the Cells

[0075] In particular embodiments, the cells of the disclosure, including a C. difficile cell such as a C. difficile cell comprising any of the cdtR genes disclosed herein, may be specifically formulated and/or they may be cultured in a particular medium. In certain aspects, C. difficile ST1-35 is formulated and/or cultured. In certain aspects, C. difficile ST1-75 is formulated and/or cultured. In certain aspects, C. difficile cdtRmut6.1 is formulated and/or cultured. In certain aspects, C. difficile cdtRmut8.1 is formulated and/or cultured. The cells may be formulated in such a manner as to be suitable for delivery to a recipient without deleterious effects, including after sufficient culturing. Also disclosed are the C. difficile cells for use in methods described herein.

[0076] In some aspects, bacteria, including C. difficile, are isolated and/or purified from a source. The bacteria may be isolated and/or purified from any suitable source. In some aspects, the source is a human sample. In some aspects, the source is a non-human sample, such as a rodent sample. Bacteria, including C. difficile, may be isolated and/or purified using any method known in the art. The isolated and/or purified bacteria may then be formulated into therapeutic compositions, including the therapeutic compositions described herein. Before or after being isolated and/or purified, the bacteria may be characterized, including by sequencing to determine the composition and identity of the isolated and/or purified bacteria as C. difficile or any C. difficile strain disclosed herein. The bacteria may be characterized by 16S rRNA or 23S rRNA sequencing.

[0077] In certain aspects, the methods described herein of treating a patient and methods comprising administering C. difficile, including any C. difficile strain disclosed herein, to a patient further comprise isolating and/or purifying the C. difficile prior to the treatment and/or administration. The purified and/or isolated C. difficile may be used in the methods described herein.

[0078] In some embodiments, bacteria may be cultured for at least between about 1 day and about 40 days. The cells may be cultured for 1, 2, 3, 4, 5, 6, 7, 8, 9, 10, 11, 12, 13, 14, 15, 16, 17, 18, 19, 20, 21, 22, 23, 24, 25, 26, 27, 28, 29, 30, 31, 32, 33, 34, 35, 36, 37, 38, 39, or 40 days. The cells may be cultured in the presence of a liquid culture medium. Typically, the medium may comprise a basal medium formulation as known in the art, including any LB medium. Compositions of the above basal media are generally known in the art, and it is within the skill of one in the art to modify or modulate concentrations of media and/or media supplements as necessary for the cells cultured. Any medium capable of supporting cells in vitro may be used to culture the cells. A defined medium, however, also can be used if the growth factors, cytokines, and hormones necessary for culturing cells are provided at appropriate concentrations in the medium. Media useful in the methods of the disclosure may comprise one or more compounds of interest, including, but not limited to, antibiotics, mitogenic compounds, or differentiation compounds useful for the culturing of cells. The cells may be grown at temperatures between 27° C. to 40° C., such as 31° C. to 37° C., and may be in a humidified incubator. The carbon dioxide content may be maintained between 2% to 10% and the oxygen content may be maintained between 1% and 22%. The disclosure, however, should in no way be construed to be limited to any one method of isolating and culturing cells. Rather, any method of isolating and culturing cells should be construed to be included in the present disclosure.

[0079] For use in the cell culture, media can be supplied with one or more further components. For example, additional supplements can be used to supply the cells with the necessary trace elements and substances for optimal growth and expansion. While many media already contain amino acids, some amino acids may be supplemented later, e.g., L-glutamine, which is known to be less stable when in solution. A medium may be further supplied with antibiotic and/or antimycotic compounds, such as, typically, mixtures of penicillin and streptomycin, and/or other compounds, exemplified but not limited to, amphotericin, ampicillin, gentamicin, bleomycin, hygromycin, kanamycin, mitomycin, mycophenolic acid, nalidixic acid, neomycin, nystatin, paromomycin, polymyxin, puromycin, rifampicin, spectinomycin, tetracycline, tylosin, and zeocin. The use of suitable serum replacements is also contemplated.

[0080] Reference to particular buffers, media, reagents, cells, culture conditions and the like, or to some subclass of same, is not intended to be limiting, but should be read to include all such related materials that one of ordinary skill in the art would recognize as being of interest or value in the particular context in which that discussion is presented. For example, it is often possible to substitute one buffer system or culture medium for another, such that a different but known way is used to achieve the same goals as those to which the use of a suggested method, material or composition is directed. In particular embodiments, cells are cultured in a cell culture system comprising a cell culture medium, preferably in a culture vessel, in particular a cell culture medium supplemented with a substance suitable and determined for protecting the cells from in vitro aging and/or inducing in an unspecific or specific reprogramming.

[0081] Suitable methods for nucleic acid delivery to effect expression of compositions are anticipated to include virtually any method by which a nucleic acid (e.g., DNA, including viral and nonviral vectors) can be introduced into a cell or an organism, as described herein or as would be known to one of ordinary skill in the art. Such methods include, but are not limited to, direct delivery of DNA such as by injection or transformation.

[0082] Also disclosed are culture systems capable of producing bacteriophage, including any bacteriophage disclosed herein such as bacteriophage encoding a mutant cdtR gene. The bacteriophage may be derived from a prophage, including from phiCD75-2 and/or phiCD75-3. The bacteriophage may be isolated and/or purified from a source. The bacteriophage may be formulated for use in a therapeutic composition, including any of the therapeutic compositions disclosed herein. The bacteriophage, including when formulated in a therapeutic composition, may be administered to a patient.

[0083] Sequences for aspects disclosed herein include

[0084] Whole genome sequence for C. difficile ST1-35 (SEQ ID NO:1)

[0085] Whole genome sequence for C. difficile ST1-75 (SEQ ID NO:2)

[0086] Whole genome sequence for C. difficile cdtRmut6.1 (SEQ ID NO:3)

[0087] Whole genome sequence for C. difficile cdtRmut8.1 (SEQ ID NO:4)

[0088] Whole genome sequence for phiCD75-2 (SEQ ID NO:5)

[0089] Whole genome sequence for phiCD75-3 (SEQ ID NO:6)

Wild-type C. difficile cdtR gene
(SEQ ID NO: 7)
GTGGATATATTAATTTTTGATAATGATGTTTGTTTTGGAATAAAA
CTAAAAGAAAAAATAAATAATATTTTAATAAAAGAAGGTTTTGAT
AACGATGTTATAAGATTATATTATAATGCAAATTTGTTATTAAAA
GAACTTACTGAAAAAAATAAAGTAAAAATATATTTTATAGTTGTA
GATGCAAAATACAAGATAAGTAATGAATTATGTGATGGATTATGG
ATAGCACAAAAAATTAGAGAATCAGATTATATTAGTCCAATCATA
TTTCTTACAAATCATATAGAAATGATTTTAGGGATCTTCGATTAT
AGGTTAGAAGTTATGGACTTTATATTAAAACATGATATGGAAATT
GCTGAAAGTAAAATAAAAGCTTGTATTAAAATTGCTCATAAAAGA
TACGTTAAAGAAAAAAATTATCGCTCTAATTTTTTTACTATCTAC
TCAGATTCCTCACTATGGAAAATTTCATTTGATGAAGTTATATAT
TTTGAAACAAGCGCTATTCCACATAAAATAAAATTAGTGACTACT
TCAAGAATATTTGAATTCTATAAAAGTTTAAGGTCTTTATCAGAT
TTAGATGCATGCTTTATTCGTGTACATAAATCTTTTGTAGTTAAT
AAATATCATATTGTTTCTCTCGACCTAAAGAAAAATAATATTAAA
ATGAGTAATGGCCATATATGTCGTATATCTAATACATATAGAAAT
ATTTTAAAGAACATTATTAAAACATAA
Avirulent C. difficile cdtR gene containing
the 69-base pair deletion
(SEQ ID NO: 8)
GTGGATATATTAATTTTTGATAACGATGTTATAAGATTATATTAT
AATGCAAATTTGTTATTAAAAGAACTTACTGAAAAAAATAAAGTA
AAAATATATTTTATAGTTGTAGATGCAAAATACAAGATAAGTAAT
GAATTATGTGATGGATTATGGATAGCACAAAAAATTAGAGAATCA
GATTATATTAGTCCAATCATATTTCTTACAAATCATATAGAAATG
ATTTTAGGGATCTTCGATTATAGGTTAGAAGTTATGGACTTTATA
TTAAAACATGATATGGAAATTGCTGAAAGTAAAATAAAAGCTTGT
ATTAAAATTGCTCATAAAAGATACGTTAAAGAAAAAAATTATCGC
TCTAATTTTTTTACTATCTACTCAGATTCCTCACTATGGAAAATT
TCATTTGATGAAGTTATATATTTTGAAACAAGCGCTATTCCACAT
AAAATAAAATTAGTGACTACTTCAAGAATATTTGAATTCTATAAA
AGTTTAAGGTCTTTATCAGATTTAGATGCATGCTTTATTCGTGTA
CATAAATCTTTTGTAGTTAATAAATATCATATTGTTTCTCTCGAC
CTAAAGAAAAATAATATTAAAATGAGTAATGGCCATATATGTCGT
ATATCTAATACATATAGAAATATTTTAAAGAACATTATTAAAACA
TAA
69-base pair deletion from the C. difficile
cdtR gene causing avirulence
(SEQ ID NO: 9)
TTTGATAATGATGTTTGTTTTGGAATAAAACTAAAAGAAAAAATA
AATAATATTTTAATAAAAGAAGGT

### III. Gene Editing Systems

[0090] Certain aspects of the present disclosure relate to methods and compositions for gene editing (also “genetic engineering”), useful in the generation of one or more genetic modifications in a cell, including genetic modifications to a cdtR gene in the cell. As used herein, a “genetic modification,” describes a region of a genome of a cell that has been altered from its native (i.e., endogenous) sequence. A genetic modification may be developed via artificial editing of a gene or other genetic material. In some embodiments, a genetic modification is a mutation of a gene. In some embodiments, a mutation is an insertion, a deletion, a point mutation, a frameshift mutation, or a nonsense mutation. One or more of these mutations may be excluded from embodiments of the disclosure. In some embodiments, a mutation prevents expression of a gene (i.e., is a knockout mutation). In some embodiments, a mutation causes production of a mutant form of a protein. In some embodiments, a genetic modification of the disclosure is a mutation of a cdtR gene.

[0091] Certain embodiments of the disclosure are directed to the use of gene editing techniques to generate a knockout mutation in a gene in a population of cells. The disclosed techniques may eliminate expression of the gene in some or all of the cells in the population. In some embodiments, expression of the gene is not detectable in the population of cells (e.g., measured by mRNA and/or protein expression). In some embodiments, expression of the gene is substantially decreased in the population of cells compared with cells not having the knockout mutation. In some embodiments, expression of the gene (e.g., measured by mRNA and/or protein expression) is decreased by at least, at most, or about 50%, 51%, 52%, 53%, 54%, 55%, 56%, 57%, 58%, 59%, 60%, 61%, 62%, 63%, 64%, 65%, 66%, 67%, 68%, 69%, 70%, 71%, 72%, 73%, 74%, 75%, 76%, 77%, 78%, 79%, 80%, 81%, 82%, 83%, 84%, 85%, 86%, 87%, 88%, 89%, 90%, 91%, 92%, 93%, 94%, 95%, 96%, 97%, 98%, 99%, 99%, 99.1%, 99.2%, 99.3%, 99.4%, 99.5%, 99.6%, 99.7%, 99.8%, 99.9%, or any range or value derivable therein. In some embodiments, expression of the gene is decreased by at least 80%, 90%, 95%, or 99%. In some embodiments, expression of the gene is decreased by at least 90%.

[0092] Various methods and systems for gene editing are known in the art and include, for example, zinc finger nuclease (ZFN)-based gene editing, transcription activator-like effector nuclease (TALEN)-based gene editing, and CRISPR/Cas-based gene editing. In some embodiments, methods of the present disclosure comprise CRISPR/Cas-based gene editing, which comprises the use of components of a CRISPR system, for example a guide RNA (gRNA) and a Cas nuclease.

[0093] In general, “CRISPR system” refers collectively to transcripts and other elements involved in the expression of or directing the activity of CRISPR-associated (“Cas”) genes, including sequences encoding a Cas gene, a tracr (trans-activating CRISPR) sequence (e.g. tracrRNA or an active partial tracrRNA), a tracr-mate sequence (encompassing a “direct repeat” and a tracrRNA-processed partial direct repeat in the context of an endogenous CRISPR system), a guide sequence (also referred to as a “spacer” in the context of an endogenous CRISPR system), and/or other sequences and transcripts from a CRISPR locus.

[0094] The CRISPR/Cas nuclease or CRISPR/Cas nuclease system can include a non-coding RNA molecule (guide) RNA, which sequence-specifically binds to DNA, and a Cas protein (e.g., Cas9), with nuclease functionality (e.g., two nuclease domains). One or more elements of a CRISPR system can derive from a type I, type II, or type III CRISPR system, e.g., derived from a particular organism comprising an endogenous CRISPR system, such as Streptococcus pyogenes.

[0095] In some aspects, a Cas nuclease and gRNA (including a fusion of crRNA specific for the target sequence and fixed tracrRNA) are introduced into the cell. A Cas nuclease and a gRNA can be introduced into the cell indirectly via introduction of one or more nucleic acids (e.g., vectors) encoding for the Cas nuclease and/or the gRNA. A Cas nuclease and a gRNA can be introduced into the cell directly by introduction of a Cas nuclease protein and a gRNA molecule. In general, target sites at the 5′ end of the gRNA target the Cas nuclease to the target site, e.g., the gene, using complementary base pairing. The target site may be selected based on its location immediately 5′ of a protospacer adjacent motif (PAM) sequence, such as typically NGG, or NAG. In this respect, the gRNA may be targeted to the desired sequence by modifying the first 20, 19, 18, 17, 16, 15, 14, 14, 12, 11, or 10 nucleotides of the guide RNA to correspond to the target DNA sequence. In general, a CRISPR system is characterized by elements that promote the formation of a CRISPR complex at the site of a target sequence. Typically, “target sequence” generally refers to a sequence to which a guide sequence is designed to have complementarity, where hybridization between the target sequence and a guide sequence promotes the formation of a CRISPR complex. Full complementarity is not necessarily required, provided there is sufficient complementarity to cause hybridization and promote formation of a CRISPR complex.

[0096] The CRISPR system can induce double stranded breaks (DSBs) at the target site, followed by disruptions as discussed herein. In other embodiments, Cas9 variants, deemed “nickases,” are used to nick a single strand at the target site. Paired nickases can be used, e.g., to improve specificity, each directed by a pair of different gRNAs targeting sequences such that upon introduction of the nicks simultaneously, a 5′ overhang is introduced. In other embodiments, catalytically inactive Cas9 is fused to a heterologous effector domain such as a transcriptional repressor or activator, to affect gene expression.

[0097] The target sequence may comprise any polynucleotide, such as DNA or RNA polynucleotides. The target sequence may be located in the nucleus or cytoplasm of the cell, such as within an organelle of the cell. Generally, a sequence or template that may be used for recombination into the targeted locus comprising the target sequences is referred to as an “editing template” or “editing polynucleotide” or “editing sequence”. In some aspects, an exogenous template polynucleotide may be referred to as an editing template. In some aspects, the recombination is homologous recombination.

[0098] Typically, in the context of an endogenous CRISPR system, formation of the CRISPR complex (comprising the guide sequence hybridized to the target sequence and complexed with one or more Cas proteins) results in cleavage of one or both strands in or near (e.g. within 1, 2, 3, 4, 5, 6, 7, 8, 9, 10, 20, 50, or more base pairs from) the target sequence. The tracr sequence, which may comprise or consist of all or a portion of a wild-type tracr sequence (e.g. about or more than about 20, 26, 32, 45, 48, 54, 63, 67, 85, or more nucleotides of a wild-type tracr sequence), may also form part of the CRISPR complex, such as by hybridization along at least a portion of the tracr sequence to all or a portion of a tracr mate sequence that is operably linked to the guide sequence. The tracr sequence has sufficient complementarity to a tracr mate sequence to hybridize and participate in formation of the CRISPR complex, such as at least 50%, 60%, 70%, 80%, 90%, 95% or 99% sequence complementarity along the length of the tracr mate sequence when optimally aligned.

[0099] One or more vectors driving expression of one or more elements of a CRISPR system can be introduced into a cell such that expression of the elements of the CRISPR system direct formation of a CRISPR complex at one or more target sites. Components can also be delivered to cells as proteins and/or RNA. For example, a Cas enzyme, a guide sequence linked to a tracr-mate sequence, and a tracr sequence could each be operably linked to separate regulatory elements on separate vectors. Alternatively, two or more of the elements expressed from the same or different regulatory elements, may be combined in a single vector, with one or more additional vectors providing any components of the CRISPR system not included in the first vector. The vector may comprise one or more insertion sites, such as a restriction endonuclease recognition sequence (also referred to as a “cloning site”). In some embodiments, one or more insertion sites are located upstream and/or downstream of one or more sequence elements of one or more vectors. When multiple different guide sequences are used, a single expression construct may be used to target CRISPR activity to multiple different, corresponding target sequences within a cell.

[0100] A vector may comprise a regulatory element operably linked to an enzyme-coding sequence encoding a Cas protein (also “Cas nuclease”). Non-limiting examples of Cas proteins include Cas1, Cas1B, Cas2, Cas3, Cas4, Cas5, Cas6, Cas7, Cas8, Cas9 (also known as Csn1 and Csx12), Cas10, Cas12a (Cpf1), Csy1, Csy2, Csy3, Cse1, Cse2, Csc1, Csc2, Csa5, Csn2, Csm2, Csm3, Csm4, Csm5, Csm6, Cmr1, Cmr3, Cmr4, Cmr5, Cmr6, Csb1, Csb2, Csb3, Csx17, Csx14, Csx10, Csx16, CsaX, Csx3, Csx1, Csx15, Csf1, Csf2, Csf3, Csf4, homologs thereof, or modified versions thereof. These enzymes are known; for example, the amino acid sequence of S. pyogenes Cas9 protein may be found in the SwissProt database under accession number Q99ZW2.

[0101] The Cas nuclease can be Cas9 (e.g., from S. pyogenes or S. pneumonia). The Cas nuclease can be Cas12a. The Cas nuclease can direct cleavage of one or both strands at the location of a target sequence, such as within the target sequence and/or within the complement of the target sequence. The vector can encode a Cas nuclease that is mutated with respect to a corresponding wild-type enzyme such that the mutated Cas nuclease lacks the ability to cleave one or both strands of a target polynucleotide containing a target sequence. For example, an aspartate-to-alanine substitution (D10A) in the RuvC I catalytic domain of Cas9 from S. pyogenes converts Cas9 from a nuclease that cleaves both strands to a nickase (cleaves a single strand). In some embodiments, a Cas9 nickase may be used in combination with guide sequence(s), e.g., two guide sequences, which target respectively sense and antisense strands of the DNA target. This combination allows both strands to be nicked and used to induce NHEJ or HDR.

[0102] In general, a guide sequence is any polynucleotide sequence having sufficient complementarity with a target polynucleotide sequence to hybridize with the target sequence and direct sequence-specific binding of the CRISPR complex to the target sequence. In some embodiments, the degree of complementarity between a guide sequence and its corresponding target sequence, when optimally aligned using a suitable alignment algorithm, is or is more than 50%, 60%, 75%, 80%, 85%, 90%, 95%, 97.5%, 99%, or more.

[0103] Optimal alignment may be determined with the use of any suitable algorithm for aligning sequences, non-limiting example of which include the Smith-Waterman algorithm, the Needleman-Wunsch algorithm, algorithms based on the Burrows-Wheeler Transform (e.g. the Burrows Wheeler Aligner), Clustal W, Clustal X, BLAT, Novoalign (Novocraft Technologies, ELAND (Illumina, San Diego, Calif.), SOAP (available at soap.genomics.org.cn), and Maq (available at maq.sourceforge.net).

### IV. Administration of Therapeutic Compositions

[0104] Certain aspects concern the administration of therapies and therapeutic compositions, including any therapeutic composition described herein that includes C. difficile and/or a bacteriophage. The therapies may be administered in any suitable manner known in the art. The therapy provided herein may comprise administration of a combination of therapeutic composition, such as a first composition and a second composition. In some aspects, the first composition comprises any C. difficile comprising composition described herein. In some aspects, the second composition comprises an additional therapeutic agent, including any additional therapeutic agent described herein such as an antibiotic. The first and second compositions may be administered sequentially (at different times) or simultaneously (at the same time). In some aspects, the first and second compositions are administered as separate compositions. In some aspects, the first and second compositions are administered as the same composition.

[0105] In some aspects, the first therapeutic composition and the second therapeutic composition are administered substantially simultaneously. In some aspects, the first therapeutic composition and the second therapeutic composition are administered sequentially. In some aspects, the first therapeutic composition, the second therapeutic composition, and a third therapy, which may be a different additional therapy, are administered sequentially or simultaneously. In some aspects, the first and second therapeutic compositions are administered concurrently and the third therapy is administered sequentially, before and/or after, with the first and second therapeutic compositions. In some aspects, the first therapeutic composition is administered before administering the second therapeutic composition. In some aspects, the first therapeutic composition is administered after administering the second therapeutic composition.

[0106] Aspects of the disclosure relate to compositions and methods comprising therapeutic compositions. The different therapies may be administered in one composition or in more than one composition, such as 2 compositions, 3 compositions, or 4 compositions. Various combinations of the agents may be employed. In some aspects, the first composition, which may be a C. difficile composition, and optionally the second composition are administered prophylactically.

[0107] The therapeutic agents of the disclosure may be administered by the same route of administration or by different routes of administration. In some aspects, the therapeutic composition is administered intracolonically, intravenously, intramuscularly, subcutaneously, topically, orally, transdermally, intraperitoneally, intraorbitally, by implantation, by inhalation, intrathecally, intraventricularly, or intranasally. In some aspects, the antibiotic is administered intravenously, intramuscularly, subcutaneously, topically, orally, transdermally, intraperitoneally, intraorbitally, by implantation, by inhalation, intrathecally, intraventricularly, or intranasally. In some aspects, the composition is administered via gavage. The appropriate dosage may be determined based on the type of disease to be treated, severity and course of the disease, the clinical condition of the patient, the patient's clinical history and response to the treatment, and the discretion of the attending physician.

[0108] The treatments may include various “unit doses.” Unit dose is defined as containing a predetermined-quantity of the therapeutic composition. The quantity to be administered, and the particular route and formulation, is within the skill of determination of those in the clinical arts. A unit dose need not be administered as a single injection but may comprise continuous infusion over a set period of time. In some aspects, a unit dose comprises a single administrable dose.

[0109] In some aspects, a single dose of the first therapeutic composition, which comprises C. difficile, is administered. In some aspects, multiple doses of the first therapeutic composition are administered. In some aspects, the first therapeutic composition is administered at a dose of between 1×10³ to 9×10⁸ CFUs or spores, or any range derivable therein. In some aspects, the first therapeutic composition is administered at a dose of at least, at most, or about 1×10³, 2×10³, 3×10³, 4×10³, 5×10³, 6×10³, 7×10³, 8×10³, 9×10³, 1×10⁴, 2×10⁴, 3×10⁴, 4×10⁴, 5×10⁴, 6×10⁴, 7×10⁴, 8×10⁴, 9×10⁴, 1×10⁵, 2×10⁵, 3×10⁵, 4×10⁵, 5×10⁵, 6×10⁵, 7×10⁵, 8×10⁵, 9×10⁵, 1×10⁶, 2×10⁶, 3×10⁶, 4×10⁶, 5×10⁶, 6×10⁶, 7×10⁶, 8×10⁶, 9×10⁶, 1×10⁷, 2×10⁷, 3×10⁷, 4×10⁷, 5×10⁷, 6×10⁷, 7×10⁷, 8×10⁷, 9×10⁷, 1×10⁸, 2×10⁸, 3×10⁸, 4×10⁸, 5×10⁸, 6×10⁸, 7×10⁸, 8×10⁸, 9×10⁸, 1×10⁹, 2×10⁹, 3×10⁹, 4×10⁹, 5×10⁹, 6×10⁹, 7×10⁹, 8×10⁹, 9×10⁹, 1×10¹⁰, 2×10¹⁰, 3×10¹⁰, 4×10¹⁰, 5×10¹⁰, 6×10¹⁰, 7×10¹⁰, 8×10¹⁰, 9×10¹⁰, 1×10¹¹, 2×10¹¹, 3×10¹¹, 4×10¹¹, 5×10¹¹, 6×10¹¹, 7×10¹¹, 8×10¹¹, 9×10¹¹, 1×10¹², 2×10¹², 3×10¹², 4×10¹², 5×10¹², 6×10¹², 7×10¹², 8×10¹², 9×10¹², 1×10¹³, 2×10¹³, 3×10¹³, 4×10¹³, 5×10¹³, 6×10¹³, 7×10¹³, 8×10¹³, 9×10¹³, 1×10¹⁴, 2×10¹⁴, 3×10¹⁴, 4×10¹⁴, 5×10¹⁴, 6×10¹⁴, 7×10¹⁴, 8×10¹⁴, 9×10¹⁴, 1×10¹⁵, 2×10¹⁵, 3×10¹⁵, 4×10¹⁵, 5×10¹⁵, 6×10¹⁵, 7×10¹⁵, 8×10¹⁵, 9×10¹⁵, 1×10¹⁶, 2×10¹⁶, 3×10¹⁶, 4×10¹⁶, 5×10¹⁶, 6×10¹⁶, 7×10¹⁶, 8×10¹⁶, 9×10¹⁶, or any range derivable therein, CFUs or spores of the bacteria.

[0110] The quantity to be administered, both according to number of treatments and unit dose, depends on the treatment effect desired. An effective dose is understood to refer to an amount necessary to achieve a particular effect.

[0111] Precise amounts of the therapeutic composition also depend on the judgment of the practitioner and are peculiar to each individual. Factors affecting dose include physical and clinical state of the patient, the route of administration, the intended goal of treatment (alleviation of symptoms versus cure) and the potency, stability and toxicity of the particular therapeutic substance or other therapies a subject may be undergoing.

[0112] It will be understood by those skilled in the art and made aware that dosage units of μg/kg or mg/kg of body weight can be converted and expressed in comparable concentration units of μg/ml or mM (blood levels). It is also understood that uptake is species and organ/tissue dependent. The applicable conversion factors and physiological assumptions to be made concerning uptake and concentration measurement are well-known and would permit those of skill in the art to convert one concentration measurement to another and make reasonable comparisons and conclusions regarding the doses, efficacies and results described herein.

[0113] In certain instances, it will be desirable to have multiple administrations of the composition, e.g., 2, 3, 4, 5, 6 or more (and any range derivable therein) administrations. The administrations can be at 1, 2, 3, 4, 5, 6, 7, 8, to 5, 6, 7, 8, 9, 10, 11, 12, 13, 14 day, week, or month intervals, including all ranges there between.

[0114] The phrases “pharmaceutically acceptable” or “pharmacologically acceptable” refer to molecular entities and compositions that do not produce an adverse, allergic, or other untoward reaction when administered to an animal or human. As used herein, “pharmaceutically acceptable carrier” includes any and all solvents, dispersion media, coatings, anti-bacterial and anti-fungal agents, isotonic and absorption delaying agents, and the like. The use of such media and agents for pharmaceutical active substances is well known in the art. Except insofar as any conventional media or agent is incompatible with the active ingredients, its use in immunogenic and therapeutic compositions is contemplated. Supplementary active ingredients, such as other anti-infective agents and vaccines, can also be incorporated into the compositions.

[0115] Administration of the compositions will typically be via any common route. This includes, but is not limited to oral, suppository, or intravenous administration. Alternatively, administration may be by orthotopic, intradermal, subcutaneous, intramuscular, intraperitoneal, or intranasal administration. Such compositions would normally be administered as pharmaceutically acceptable compositions that include physiologically acceptable carriers, buffers or other excipients.

[0116] The desired dose of the composition of the present disclosure may be presented in multiple (e.g., two, three, four, five, six, or more) sub-doses administered at appropriate intervals throughout the day.

[0117] Upon formulation, solutions will be administered in a manner compatible with the dosage formulation and in such amount as is therapeutically or prophylactically effective. The formulations are easily administered in a variety of dosage forms, such as the type of injectable solutions described above.

### V. Methods of Treatment

[0118] Provided herein are methods for treating or delaying progression of certain diseases or disorders, such as intestinal diseases including colitis, by administration of therapeutic compositions, such as compositions comprising bacteria, including C. difficile and/or a bacteriophage, to a patient. The intestinal disorder may comprise intestinal inflammation including damage to the colonic epithelium. In some aspects, the C. difficile treatment results in a sustained response, such as a sustained microbiome, in the patient after cessation of the treatment.

[0119] The term “treatment” or “treating” means any treatment of a disease in a mammal, including: (i) preventing the disease, that is, causing the clinical symptoms of the disease not to develop by administration of a protective composition prior to the induction of the disease; (ii) suppressing the disease, that is, causing the clinical symptoms of the disease not to develop by administration of a protective composition after the inductive event but prior to the clinical appearance or reappearance of the disease; (iii) inhibiting the disease, that is, arresting the development of clinical symptoms by administration of a protective composition after their initial appearance; and/or (iv) relieving the disease, that is, causing the regression of clinical symptoms by administration of a protective composition after their initial appearance. In some aspects, the treatment may exclude prevention of the disease.

[0120] In certain aspects, the patient administered a therapeutic composition is identified as having, or is at risk of having, a disease, or disorder, including an intestinal disorder such as colitis. The colitis may be caused by a C. difficile infection. In certain aspects, the administration of a therapeutic composition to a patient alters the microbiome, including altering the bacteria in the microbiome, and/or microbiome environment in the patient. In some aspects, the administration of the therapeutic composition decreases the amount of at least one bacterial strain, bacteria, and/or genus of bacteria. In some aspects, the administration of the therapeutic composition decreases the amount of a wild-type C. difficile. In some aspects, the administration of the therapeutic composition alters the microbiome by altering the expression of at least one gene expressed in bacteria of the microbiome. The gene(s) may comprise a gene regulated by a cdtR protein. In some aspects, the administration of the therapeutic composition alters the regulation, production, and/or secretion of bacterial toxins.

### VI. Methods of Determining Bacterial Compositions

[0121] In some aspects, the methods relate to determining bacterial compositions present in a sample from a patient. In some aspects, obtaining a microbiome profile comprises the steps of or the ordered steps of: i) obtaining a sample obtained from a patient, ii) isolating one or more bacterial species from the sample, iii) isolating one or more nucleic acids from at least one bacterial species, and iv) analyzing the isolated nucleic acids. Analyzing the nucleic acids can comprise any method to determine the mutation status of a gene, including a cdtR gene. Analyzing the nucleic acid can comprise analyzing whether a gene is mutated, including whether a cdtR gene is mutated. Analyzing the nucleic acid can comprise PCR, sequencing, restriction enzyme analysis, or other methods to determine mutations. When performing the methods necessitating genotyping, any genotyping assay can be used.

[0122] In some aspects, determining bacterial compositions present in a sample of a patient is used to monitor the need of administering the therapeutic compositions described herein to the patient. In certain aspects, obtaining the microbiome profile of a patient is used to monitor the efficacy of the therapeutic compositions administered to the patient, including monitoring the concentration of C. difficile in the microbiome profile. In certain aspects, the patient is or is not administered a therapeutic composition based on the mutation status of a cdtR gene present in an infection in the patient. Methods for determining mutation status may include one or more microbiology methods such as sequencing, next generation sequencing, western blotting, comparative genomic hybridization, PCR, ELISA, etc.

[0123] Certain aspects relate to methods of prognosing the effectiveness of a therapy in a patient. In some aspects, the method prognoses the effectiveness of a bacterial and/or antibiotic therapy in a patient. The patient may have received, or will receive, an antibiotic. In certain aspects, the effectiveness of the therapy is determined by obtaining a microbiome profile from the patient.

### VII. Kits

[0124] Certain aspects of the disclosure also encompass kits for performing the methods of the disclosure. Such kits can be prepared from readily available materials and reagents. For example, such kits can comprise any one or more of the following materials: enzymes, reaction tubes, buffers, detergent, primers, probes, antibodies.

[0125] In a particular aspect, these kits may comprise a plurality of agents for assessing or identifying microorganisms, wherein the kit is housed in a container. The kits may further comprise instructions for using the kit for assessing sequences, means for converting and/or analyzing sequence data to generate prognosis.

[0126] Kits may comprise a container with a label. Suitable containers include, for example, bottles, vials, and test tubes. The containers may be formed from a variety of materials such as glass or plastic. The container may hold a composition which includes a probe that is useful for prognostic or non-prognostic applications, such as described above. The label on the container may indicate that the composition is used for a specific prognostic or non-prognostic application, and may also indicate directions for either in vivo or in vitro use, such as those described above. The kit may comprise the container described above and one or more other containers comprising materials desirable from a commercial and user standpoint, including buffers, diluents, filters, needles, syringes, and package inserts with instructions for use.

[0127] Further kit aspects relate to kits comprising the therapeutic compositions of the disclosure. The kits may be useful in the treatment methods of the disclosure and comprise instructions for use.

### EXAMPLES

[0128] The following examples are included to demonstrate preferred embodiments of the invention. It should be appreciated by those of skill in the art that the techniques disclosed in the examples which follow represent techniques discovered by the inventor to function well in the practice of the invention, and thus can be considered to constitute preferred modes for its practice. However, those of skill in the art should, in light of the present disclosure, appreciate that many changes can be made in the specific embodiments which are disclosed and still obtain a like or similar result without departing from the spirit and scope of the invention.

A. Clinical ST1 C. difficile Isolates Demonstrate Variable Severities in Mice.

[0129] The inventors focus on a group of 23 C. difficile isolates belonging to ribotype 027 epidemic strains (here referred to as ST1) isolated from patients with diarrhea during a molecular surveillance program at Memorial Sloan Kettering Cancer Center 2013-2017.²² Whole-genome Illumina sequencing of these isolates allows a comparison between them and public collections. The inventors plotted a UMAP analysis of the presence or absence of unique coding sequences (annotated proteins or un-annotated protein clusters) across top 10 STs of C. difficile strains in Patric (date: Feb. 10, 2021).²³ Different STs cluster individually and the ST1 isolates overlap with other ST1 C. difficile included in the analysis, confirming their strain type (FIG. 1A). These 23 isolates demonstrate high genome-wide similarity by average nucleotide identity (ANI) score above 99.8% and encode identical Pathogenicity Locus (PaLoc) sequences (FIG. 8A-8B). To study if close-related C. difficile isolates may have variable virulence, mice treated with antibiotics (metronidazole, neomycin, vancomycin in drinking water with clindamycin intraperitoneal injection) were orally infected with each of these isolates at a dose of 200 spores and C. difficile pathogenicity was monitored throughout a 7-day-timecourse (FIG. 1B). Mice infected with different ST1 isolates displayed a spectrum of disease severity, including variable weight loss and mortality (FIG. 1C and FIG. 8C). The widely used ST1 lab strain R20291 was included in parallel for virulence comparison. Within the ST1 collection, 5 isolates resulted in mortality in mice. A few isolates caused more severe weight loss than R20291, including ST1-49, ST1-11 and ST1-12, while most ST1 isolates caused moderate and non-lethal infections. Two isolates, ST1-75 and ST1-35 demonstrated no impact on mouse body weights. No apparent colonization deficiency was observed in any of these isolates (FIG. 8D). The variable pathogenicity induced by a group of ST1 isolates with identical PaLoc suggested additional regulatory mechanisms of C. difficile virulence. Therefore, the inventors sought to examine other genomic factors that are responsible for attenuated virulence of C. difficile isolates ST1-75 and ST1-35.

B. Two ST1 C. difficile Isolates Demonstrate Avirulent Phenotype

[0130] Among the C. difficile isolates that the inventors examined using antibiotic-treated mice, two isolates, ST1-75 and ST1-35, caught the inventors' attention due to their strikingly attenuated phenotypes (FIG. 1B). Almost no weight loss was observed throughout the 7-day-timecourse, and low acute disease scores were displayed in mice infected with ST1-75 or ST1-35, in comparison to mice infected with R20291 (FIGS. 2A-2B and 2D-2E). This avirulent phenotype was not due to colonization deficiency of ST1-75 or ST1-35, as the fecal CFU recovered from the mice infected with these two isolates were comparable to R20291-infected mice on both early and late days post-infection (FIGS. 2C and 2F). Fecal levels of TcdA and TcdB were also measured, and similar levels were seen in the feces at day +1 post-infection from mice infected with ST1-75 and ST1-35, compared to R20291 (FIG. 2G-2H).

[0131] To further investigate this avirulent phenotype, the inventors inoculated ST1-75 into MyD88^{-/-} mice, which lack the adaptor protein for Toll-like receptor signaling.²⁴ MyD88^{-/-} mice fail to recruit neutrophils to the colonic tissue during early stages of C. difficile infection, and display markedly increased susceptibility to C. difficile induced colitis.²⁵ Here, MyD88^{-/-} mice were treated with antibiotics and infected with either ST1-75 or R20291. Mice infected with R20291 quickly succumbed to infection 2 days after spore inoculation, whereas all MyD88^{-/-} mice infected with ST1-75 survived the experiment with minimal weight loss or disease scores (FIG. 3A-3B). Consistent with the results with wildtype mice, no deficiencies of colonization or toxin production were observed day+1 post infection of MyD88^{-/-} mice (FIG. 3C-3D). These data suggest that the attenuation of the avirulent strain is independent of MyD88-mediated host innate immunity.

[0132] Germ-free mice are highly susceptible to C. difficile infection because they microbiome-mediated colonization resistance against C. difficile.^{26,27} To investigate whether the gut microbiome renders ST1-75 avirulent, germ-free mice were infected with ST1-75 or R20291. Similarly, the inventors observed no mortality or weight loss in the mice with ST1-75 infection, whereas mice infected with R20291 quickly lost weight and died (or >20% weight loss) (FIG. 3E). Milder diarrhea was observed in mice with ST1-75 compared to R20291 (FIG. 3F). The inventors observed no differences in colonization or fecal toxins between ST1-75 and R20291 up to 24 hours post infection (FIG. 3G-3H). Similar attenuation was also seen in ST1-35 infected germ-free mice (FIG. 9). In contrast, isolates that demonstrated relatively mild pathogenicity in antibiotic-treated mice, such as ST1-25 and ST1-67 (FIG. 1B), led to severe weight loss and diarrhea in germ-free mice (FIG. 9), reaffirming the protective role of the gut microbiome during C. difficile infection. However, the attenuation of ST1-75 and ST1-35 in mice is independent of the gut microbiome.

C. Novel Prophages Identified in Avirulent Strains do not Impact ST1 C. difficile Virulence.

[0133] The inventors next sought to determine the genetic factors that may abrogate C. difficile virulence in ST1-75 and ST1-35. Fully circularized genomes of 14 ST1 isolates were successfully obtained using Nanopore and Illumina hybrid assembly, and pangenomic analysis was conducted on these 14 genomes and R20291 using Anvi'o pangenomics workflow.²⁸ A group of gene clusters that is unique to ST1-75 and ST1-35 stood out, which are enriched for phage-related genes (FIG. 4A). The inventors then applied PHASTER, a tool for phage identification in bacterial genomes, to discover two unique prophages in the genomes of ST1-75 and ST1-35. One prophage resides on a 41-kb plasmid in ST1-75 and ST1-35 with 4-5 copies per cell and here is named as phiCD75-2 (FIG. 10A). Blasting phiCD75-2 found high similarities to reported C. difficile phages phiCD38-2 (99.8% identity) and phiCDHS1 (94.7% identity).²⁹⁻³² In addition, a unique 54-kb segment was found as inserted into the chromosomal DNA of ST1-75 and ST1-35 around position 1.29 Mbp and here is named as phiCD75-3 (FIG. 10A). PhiCD75-3 does not show high similarity to any described C. difficile phages to date.

[0134] Lysogenic bacteriophages have been identified in many C. difficile genomes, and play an important role in shaping C. difficile evolution. However, their roles in C. difficile biology, especially virulence, are not well-characterized.^{33,34} To investigate the potential role of these two prophages on C. difficile virulence, the inventors induced lytic phage particles of phiCD75-2 and phiCD75-3 from ST1-75 culture and infected R20291 to generate R20291 lysogens harboring these prophages. The inventors were able to generate R20291 derivatives carrying phiCD75-2, phiCD75-3 or both prophages in their genomes (FIG. 4B). Whole-genome sequencing of lysogenic R20291 strains confirmed that phiCD75-3 was inserted in situ as in ST1-75 at 1.29 Mbp. Antibiotic-treated mice infected with R20291 lysogenic strains (FIG. 4B) followed the curve of virulent infection as 10% weight loss and 4-6 disease scores were seen during the peak of symptomatic infection (FIG. 4C-4D). The seemingly faster recovery in the lysogens was not a reproducible finding. Similar levels of colonization and toxin production were also observed (FIGS. 4E and 10B-10D). Disclosed herein are two prophages in avirulent strains ST1-75 and ST1-35, that are not present in R20291 or other ST1 strains from the collection of. However, these two prophages do not appear to impact the virulence of R20291 in antibiotic-treated mice.

D. Mutations in the cdtR Gene Eliminate ST1 C. difficile Virulence in Mice.

[0135] Lysogenic R20291 strains with either or both prophages did not recapitulate the avirulent phenotype of ST1-75 or ST1-35. A closer look at the chromosomal genomes of ST1-75 and ST1-35 led to the discovery of a common mutation in their cdtR gene, which was reported previously as a transcriptional regulator for binary toxin (CDT) genes, cdtA and cdtB.³⁵ A unique 69-bp deletion was found in the cdtR gene of ST1-75 and ST1-35, leading to an in-frame deletion of 23 amino acids (FIG. 5A). To investigate if there is a possible loss of function of CdtR resulted from the deletion, the inventors accessed the transcriptional level of cdtB in mouse cecum following infection of ST1-75 or R20291. More than a 2-log reduction of cdtB transcripts was observed in ST1-75 group (FIG. 5B), suggesting an important role of these 69 base pairs for a fully functional cdtR gene. Next, the inventors applied CRISPR-mediated genome editing approach to generate CdtR mutants using parental R20291 strain to study the contribution of CdtR to C. difficile virulence (FIGS. 11A and 5A). In accordance with a previous report²¹, knocking out cdtR either by deleting the whole gene (CdtRKO8.1 and CdtRKO10.3), or introducing a proximal premature stop codon (CdtRstop4.2 and CdtRstop8) led to a loss of pathogenicity in antibiotic-treated mice (FIG. 11B-11C), confirming a critical role of CdtR for C. difficile virulence. Moreover, deleting the exact same 69-bp region, as in ST1-75/35, in the cdtR of R20291 (CdtRmut6.1 and CdtRmut8.1) again eliminated the virulence of C. difficile (FIG. 5C-5D). Thus, loss of the 69-bp in cdtR explains the avirulence phenotype of ST1-75/35. On the other hand, colonization of these CdtR mutants, assessed by CFU at day+1 post infection, was comparable to that of R20291 (FIGS. 11D and 11F), suggesting that CdtR is not required for colonization. Interestingly, while the fecal levels of TcdA and TcdB of CdtR mutants were comparable to R20291 in the early phase (day+1 post-infection), a significantly reduced level at a later time point (7-days post infection) was observed upon infection of CdtR mutants (FIGS. 11E and 5E), supporting a role of CdtR in regulating PaLoc toxins production. Further, infecting germ-free mice with CdtRmut6.1 results in no weight loss or diarrhea, perfectly recapitulating ST1-75 and ST1-35 phenotypes in germ-free mice (FIGS. 5F-5G and FIG. 11G). Collectively, CRISPR-edited CdtR mutant strains mimic phenotypes of ST1-75 and ST1-35 in mice, demonstrating that cdtR gene is necessary for in vivo virulence. Furthermore, the 69-bp region in cdtR, which is deleted in ST1-75/35, is necessary for proper CdtR function through mechanisms yet to be determined.

E. Mutations in cdtR Reduce PaLoc Toxin Transcription In Vivo

[0136] CdtR mutants produce significantly reduced fecal toxins at a later time point (7-days post infection) (FIGS. 5E and 11E), a phenotype that was confirmed in ST1-75 and ST1-35 (FIGS. 12A-12B). To examine whether the 69-bp deletion in cdtR impacts PaLoc toxin production, the inventors harvested cecal contents from germ-free mice infected with ST1-75 or R20291. In contrast to fecal toxin levels, the inventors observed a significantly reduced cecal toxin level in mice infected with ST1-75 compared to R20291 (FIG. 6A). This was not due to a slightly lower CFU of cecal ST1-75 in germ-free mice (FIGS. 12C-12D). The inventors further validated the reduced toxin production in cecal content by RT-qPCR and the inventors observed a 50-fold reduction of the tcdA and tcdB transcripts in the cecum of mice infected with ST1-75 (FIG. 6B). Additionally, transcriptions of other PaLoc genes including tcdE and tcdR were also reduced in the cecum of mice infected with ST1-75 (FIG. 6B). TcdE is a putative holin that mediates toxin secretion.³⁶⁻³⁸ Reduced tcdE likely further impacts the amount of toxins that may reach to the intestinal epithelium. TcdR is a positive regulator of the PaLoc39.40 and is likely the common target of CdtR, which results in the observed downregulation of many PaLoc genes. Interestingly, cdtR transcripts were comparable between ST1-75 and R20291, suggesting that the 69-bp deletion does not impact the transcripts stability but leads to a nonfunctioning product. These results were further confirmed with CdtRmut6.1 strain, though to a lesser extent (FIG. 12E). Collectively, the inventors demonstrated that a natural mutation found in cdtR of two ST1 clinical isolates results in reduced binary toxin production, reduced PaLoc toxin production (and likely secretion) in cecum of infected mice, and attenuated C. difficile virulence, independent of host innate immunity, colonization burden, microbiome constitution, or any noticeable impact of incidentally discovered prophages within these strains. This difference of toxin production in cecum at 24-hour post infection is however, not reflected in feces in parallel, but could be reflected at a later time point, likely due to cumulative differences over time.

F. cdtR is Versatile and More Prevalent than cdtA and cdtB

[0137] The data support a regulatory role of CdtR outside CdtLoc, so the inventors hypothesize that CdtR may evolve to impact virulence beyond regulating CDT binary toxins. To test this possibility, the inventors surveyed the presence of cdtR, cdtA and cdtB in two major C. difficile clinical collections.^{23,41} As expected, the majority of clade 2 strains, including the epidemic ST1/RT027 strains, contains the CdtLoc with the presence of all three genes. Other subgroups of C. difficile strains, including MLST5 and MLST11 were also reported to encode CDT (FIG. 7A).^{42,43} Unexpectedly, many strain types of C. difficile that were reported as CDT-negative also encode cdtR, such as MLST2, MLST8 from clade 1 (FIG. 7A). The higher prevalence of cdtR over cdtA and cdtB supports the possibility that CdtR functions beyond regulating CDT. Additional work is needed to evaluate the functions of CdtR in these CDT-negative strains. On the contrary, the presence of cdtR in CDT-positive strains may lose its function, such as in MLST11 strains, where a premature stop codon was found and results in a cdtR pseudogene⁴², as well as here in the case of ST1-75/35. To evaluate the prevalence of cdtR mutations that may lead to a loss of function, the inventors aligned all cdtR genes in MLST1 strains from the two described collections and found a few strains having similar truncations at the proximal end and may have lost CdtR function, yet the inventors did not find the exact same deletion as in ST1-75/35 within almost 500 strains (FIG. 13A).

[0138] The high similarity between ST1-75 and ST-35 genetically and phenotypically led the inventors reason whether they are clonal. The inventors performed a core-genome SNP analysis across all ST1 isolates from the collection with R20291 as the reference. ST1-75 and ST1-35 shared all SNPs when compared to the genome of R20291 (FIG. 13B). Additional clinical evidence supports ST1-35 and ST1-75 being clonal strains isolated from two patients that shared the same hospital room a few days apart (FIG. 13C). The survey on CdtLoc genes suggest that this locus is very versatile during evolution and cdtR is more prevalent than cdtA and cdtB, which may regulate virulence beyond CDT.

### G. Avirulent C.Difficile Strain Provides Protection Against Virulent Infection in Mice

[0139] Wildtype C57BL/6 mice (n=4 per group) were treated with metronidazole, vancomycin, and neomycin (MNV, 0.25 g/L for each) in drinking water for 3 days and followed by one intraperitoneal injection of clindamycin (200 μg/mouse) 2 days after antibiotic recess. Then, mice were inoculated with 200 C. difficile spores via oral gavage. In the case of co-infection, mice were inoculated with 100 C. difficile spores for each indicated strains via oral gavage. Daily body weight and acute disease scores were monitored for 7 days post infection (FIGS. 14A-14D). Additionally, two mutant R20291 strains were generated (CdtRmut6.1 (SEQ ID NO:3) and CdtRmut8.1 (SEQ ID NO:4)) with the 69-bp region deleted in the cdtR gene.

H. Discussion on Results and Expectations from Certain Aspects

[0140] Mouse models are valuable tools to study how C. difficile strain variations may result in variable disease severities, thanks to the advantages of their identical genetic, immune background and controlled microbiome compositions. Here, the inventors focused on a group of clinical C. difficile isolates belonging to the RT027/MLST1, with high genomic similarity, that all encode PaLoc and CdtLoc. The inventors found that these similar C. difficile isolates caused variable disease severities in mice and that a very specific mutation in the cdtR gene rendered two clinical isolates, ST1-75 and ST1-35, avirulent. Avirulence was solely dependent on the cdtR mutation, as the inventors obtained similar observations using MyD88^{-/-} mice, and germ-free mice, which was also further validated with CRISPR-edited cdtR mutants. Lower transcripts of binary toxin gene cdtB, toxins A tcdA, toxin B tcdB, together with other PaLoc genes including regulator tcdR and putative holin tcdE, were observed in mouse cecum infected with the CdtR mutants. The data support a critical role of CdtR in regulating C. difficile toxin production and secretion, which is essential to ST1 virulence. However, all the other ST1 isolates in this study encoded an intact CdtLoc with wildtype cdtR, whose variations in virulence are likely attributable to alternative mechanisms.

[0141] The presence of a binary toxin locus has been associated with epidemic strains and hypervirulence of C. difficile.^{44,45} CDT belongs to the family of ADP-ribosylating toxins that consist of two components: CDTa (cdtA), the enzymatic active ADP-ribosyltransferase which modifies cellular actin, and CDTb (cdtB), the binding component facilitates CDTa translocation. However, despite knowing their enzymatic activities, experimental evidence is very limited to support critical roles of CDT in C. difficile virulence.⁴⁶ CDTb was reported to induce TLR2-dependent pathogenic inflammation, which suppresses a protective cosinophilic response and enhances virulence of RT027 strains, however, C. difficile lacking CDTb still causes acute disease in mice.⁴⁷ On the other hand, CdtR, as the transcriptional regulator of cdtA and cdtB^{6,35,48}, has been previously linked to PaLoc toxin production²¹, suggesting a role as a major virulence regulator. Here, the inventors demonstrated a critical role of CdtR as a determinant of C. difficile virulence within ST1 strains. A natural 69-bp deletion in cdtR that was found in two clinical isolates can reverse the virulence of a wildtype strain, by downregulating the expression of PaLoc genes and binary toxin genes. Additionally, higher prevalence of cdtR over cdtA or cdtB was found while surveying CdtLoc on clinical isolates from public databases. This suggests CdtR may have evolved to function beyond regulating cdtA and cdtB. Systematically examining the target genes of CdtR may give insights on its additional functions, which may also help unveil the mechanisms by which CdtR regulates the PaLoc genes.

[0142] ST1-75 and ST1-35 are avirulent in susceptible mouse models despite producing toxins, albeit at reduced levels. This is intriguing because it is well appreciated that toxin expression is necessary for C. difficile virulence.^{46,49} However, the data indicate that toxin production is not sufficient for causing CDI. The amount of toxin being produced and released is likely impact the development of disease. The patients from whom the inventors isolated ST1-75 or ST1-35 had an overall mild clinical assessment, whose symptoms may be attributable to causes other than C. difficile infection. Current CDI diagnoses largely depend on the detection of TcdB gene or toxin B positivity in feces and may lead to overdiagnosis of CDI. The studies suggest the importance of quantifying toxins to evaluate CDI cases.⁵⁰⁻⁵² Incorporating adjunctive biomarkers, such as IL-1β. better distinguishes CDI from asymptomatic carriage and non-CDI diarrhea.⁵³ Here. CdtR regulates both toxin production and secretion, and is essential for C. difficile virulence in mice, suggesting it may serve as an adjunctive biomarker for CDI diagnosis.

[0143] Apart from characterizing CdtR, the inventors also identified two prophages in ST1-75 and ST1-35. Prophages have been identified in many C. difficile genomes, and play important roles in shaping C. difficile evolution.³³ While prophages are highly prevalent in C. difficile, little is known about how prophages impact C. difficile biology. A couple of pioneering studies have shown that prophages can affect C. difficile gene expression, impacting toxin production.^{29,54,55} In this study the inventors identified two prophages in ST1-75/35 and named them phiCD75-2 and phiCD75-3. By making R20291 lysogenic strains harboring either or both prophages, the inventors observed minimal impacts on C. difficile virulence by neither of the prophages in antibiotic-treated mice. PhiCD38-2 was shown to increase PaLoc gene expression and toxin production in some RT027 isolates, but not in all of them, suggesting that the genetic background influences the impact of a newly acquired prophage.²⁹ This may explain why phiCD75-2 (a phiCD38-2 derivative) did not increase toxin production ST1-75. Certain phages also impact phase variation of the cell surface protein, biofilm formation, and carry genes involved in quorum sensing, inferring their roles in bacterial fitness.^{30,56,57} One could investigate how phiCD75-2 and phiCD75-3 may impact C. difficile fitness.

[0144] In summary, the inventors demonstrate that ST1 C. difficile clinical isolates with identical PaLoc display variable virulence in vivo. Among them, two clonal clinical isolates, ST1-75 and ST1-35, were avirulent in mice, due to a 69-bp deletion mutation in their cdtR genes. These data suggest that specific cdtR genetic variants within the same strain type may predict disease occurrence and severity. Routine detection of these variants may enhance the specificity of NAATs for CDI diagnosis. The data also corroborate recent clinical observations that toxin detection is unreliable as the sole criterion to distinguish between C. difficile infection and colonization.

### I. Material and Methods for Certain Aspects Herein

1. C. difficile Clinical Isolate Collection and Classification

[0145] Toxigenic C. difficile-positive stool specimens were collected at Memorial Sloan Kettering Cancer Center between 2013-2017. C. difficile isolates were recovered by plating onto brain heart infusion (BHI) agar plates supplemented with yeast extract, L-cysteine (BHIS), and the antibiotics D-cycloserine and cefoxitin (BHI and yeast extract were from BD Biosciences, and the other components were from Sigma-Aldrich) in an anaerobic chamber (Coylabs). Individual colonies that were able to grow in the presence of these antibiotics and that had the characteristic phenotype of C. difficile were selected, isolated, and subjected to whole-genome sequencing and MLST classification.⁵⁸

### Mouse Husbandry

[0146] Wild-type C57BL/6 mice, aged 6 to 8 weeks, were purchased from the Jackson Laboratories. MyD88^{-/-} mice were maintained in augmentin (0.48 g/L and 0.07 mg/L of amoxicillin and clavulanate respectively) in the drinking water in specific-pathogen-free (SPF) facility at the University of Chicago. Germ-free C57Bl/6J mice were bred and maintained in plastic gnotobiotic isolators within the University of Chicago Gnotobiotic Core Facility and fed ad libitum autoclaved standard chow diet (LabDiets 5K67) before transferring to BSL2 room for infection. Mice housed in the BSL2 animal room are fed irradiated feed and provided with acidified water. All mouse experiments were performed in compliance with University of Chicago's institutional guidelines and were approved by its Institutional Animal Care and Use Committee.

2. C. difficile Spore Preparation and Numeration

[0147] C. difficile sporulation and preparation was processed as described previously⁵⁹ with minor modifications. Briefly, single colonies of C. difficile isolates were inoculated in deoxygenated BHIS broth and incubated anaerobically for 40-50 days. C. difficile cells were harvested by centrifugation and five washes with ice-cold water. The cells were then suspended in 20% (w/v) HistoDenz (Sigma, St. Louis, MO) and layered onto a 50% (w/v) HistoDenz solution before centrifugating at 15,000×g for 15 minutes to separate spores from vegetative cells. The purified spores pelleted at the bottom were then collected and washed for four times with ice-cold water to remove traces of HistoDenz, and finally resuspended in sterile water. Prepared spores were heated to 60° C. for 20 min to kill vegetative cells, diluted and plated on both BHIS agar and BHIS agar containing 0.1% (w/v) taurocholic acid (BHIS-TA) for numeration. Spore stocks for mouse infection were verified to have less than 1 vegetative cell per 200 spores (as the infection dose).

### 3. Virulence Assessment of Clinical Isolates in Mice

[0148] SPF mice were treated with antibiotic cocktail containing metronidazole, neomycin and vancomycin (MNV) in drinking water (0.25 g/L for each antibiotic) for 3 days, 2 days after removing MNV, the mice were received one dose of clindamycin (200 μg/mouse) via intraperitoneal injection. Mice were then the next day infected with 200 C. difficile spores via oral gavage. Germ-free mice were infected with 200 C. difficile spores via oral gavage without antibiotic treatments.

[0149] Following infection, mice were monitored and scored for disease severity by four parameters⁶⁰: weight loss (>95% of initial weight=0, 95%-90% initial weight=1, 90%-80% initial weight=2, <80%=3), surface body temperature (>95% of initial temp=0, 95%-90% initial temp=1, 90%-85% initial temp=2, <85%=3), diarrhea severity (formed pellets=0, loose pellets=1, liquid discharge=2, no pellets/caked to fur=3), morbidity (score of 1 for each symptoms with max score of 3; ruffled fur, hunched back, lethargy, ocular discharge).

### 4. Quantification of Fecal Colony Forming Units

[0150] Fecal pellets or cecal content from C. difficile infected mice were harvested and resuspended in deoxygenated phosphate-buffed saline (PBS), diluted and plated on BHI agar supplemented with yeast extract, taurocholic acid, L-cysteine, D-cycloserine and cefoxitin (CC-BHIS-TA) at 37° C. anaerobically for overnight.⁶¹

### 5. Cell-Based Assay to Quantify Fecal and Cecal Toxin

[0151] The presence of C. difficile toxins was determined using a cell-based cytotoxicity assay as previously described with minor modifications.⁶¹ Briefly, Chinese hamster ovary cells (CHO/dhFr-, ATCC #CRL-9096) were incubated in a 96-well plate overnight at 37° C. Ten-fold dilutions of supernatant from resuspended fecal or cecal content were added to CHO/dhFr-cells, incubated overnight at 37° C. Cell rounding and death was scored the next day. The presence of C. difficile toxins was confirmed by neutralization by antitoxin antisera (Techlab, Blacksburg, VA). The data are expressed as the log 10 reciprocal value of the last dilution where cell rounding was observed.

### 6. DNA Extraction, RNA Extraction and Reverse Transcription

[0152] Fecal DNA was extracted using DNeasy PowerSoil Pro Kit (Qiagen), and RNA was isolated from cecal contents using RNeasy PowerMicrobiome Kit (Qiagen) according to the manufacturer's instructions, respectively. Complementary DNA was generated using the QuantiTect reverse transcriptase kit (Qiagen) according to the manufacturer's instructions.

7. Quantitative Polymerase Chain Reaction (qPCR)

[0153] Quantitative PCR was performed on genomic DNA or complementary DNA using primers (listed in Table 1) with PowerTrack SYBR Green Master Mix (Thermo Fisher). Reactions were run on a QuantStudio 6 pro (Thermo Fisher). Relative abundance was normalized by ΔΔCt.

TABLE 1
Oligonucleotides used in aspects herein

| | | SEQ ID | | |
|---|---|---|---|---|
| Name | Sequence 5′-3′ | NO | Reference | Purpose |
| tcdA_qFor | GTATGGATAGGTGGAGAAGT | 10 | Babakhani 2012 J | Forward primer |
| | CA | | Antimicrobial | for tcdA |
| | | | Chemotherapy | transcription |
| | | | | analysis |
| tcdA_qRev | CTCTTCCTCTAGTAGCTGTA | 11 | Babakhani 2012 J | Reverse primer |
| | ATGC | | Antimicrobial | for tcdA |
| | | | Chemotherapy | transcription |
| | | | | analysis |
| tcdB_qFor | AGCAGTTGAATATAGTGGTT | 12 | Wroblewski 2009 J | Forward primer |
| | TAGTTAGAGTTG | | Clin Microbiol. | for tcdB |
| | | | | transcription |
| | | | | analysis |
| tcdB_qRev | CATGCTTTTTTAGTTTCTGGA | 13 | Wroblewski 2009 J | Reverse primer |
| | TTGAA | | Clin Microbiol. | for tcdB |
| | | | | transcription |
| | | | | analysis |
| tcdE_qFor | ATAAACCTAGGAGGCGTTAT | 14 | Edwards 2020 J | Forward primer |
| | GAATATGA | | Bacteriology | for tcdE |
| | | | | transcription |
| | | | | analysis |
| tcdE_qRev | TTATTGCACTTAAACATCCT | 15 | Edwards 2020 J | Reverse primer |
| | AATAATGTATCAAA | | Bacteriology | for tcdE |
| | | | | transcription |
| | | | | analysis |
| tcdR_qFor | AGCAAGAAATAACTCAGTA | 16 | Edwards 2020 J | Forward primer |
| | GATGATT | | Bacteriology | for tcdR |
| | | | | transcription |
| | | | | analysis |
| tcdR_qRev | TTATTAAATCTGTTTCTCCCT | 17 | Edwards 2020 J | Reverse primer |
| | CTTCA | | Bacteriology | for tcdR |
| | | | | transcription |
| | | | | analysis |
| cdtB_qFor | GCAGTTAAGTGGGAAGATA | 18 | Angione 2014 J Mol | Forward primer |
| | G | | Diagn | for cdtB |
| | | | | transcription |
| | | | | analysis |
| cdtB_qRev | TCCATACCTACTCCAACAAT | 19 | Angione 2014 J Mol | Reverse primer |
| | | | Diagn | for cdtB |
| | | | | transcription |
| | | | | analysis |
| cdtR-2_qFor | TTGAAACAAGCGCTATTCCA | 20 | This study | Forward primer |
| | CA | | | for cdtR |
| | | | | transcription |
| | | | | analysis |
| cdtR-2_qRev | TGTACACGAATAAAGCATGC | 21 | This study | Reverse primer |
| | | | | for cdtR |
| | ATC | | | transcription |
| | | | | analysis |
| rpsJ_qFor | GATCACAAGTTTCAGGACCT | 22 | Metcalf 2010 | Forward primer |
| | G | | Anaerobe | for rspJ |
| | | | | transcription |
| | | | | analysis |
| rpsJ_qRev | GTCTTAGGTGTTGGATTAGC | 23 | Metcalf 2010 | Reverse primer |
| | | | Anaerobe | for rspJ |
| | | | | transcription |
| | | | | analysis |
| adk_qFor | GTGTATGTGATGTATGCCAA | 24 | Metcalf 2010 | Forward primer |
| | G | | Anaerobe | for adk |
| | | | | transcription |
| | | | | analysis |
| adk_qRev | CCTAAGGCTGCGACAATATC | 25 | Metcalf 2010 | Reverse primer |
| | | | Anaerobe | for adk |
| | | | | transcription |
| | | | | analysis |
| R_cdtR_up_ | GCCTAAACACACATTATCAT | 26 | This study | Forward primer |
| For | AAACAGCTATGACCGCGGCC | | | amplifying |
| | CTCTCTG | | | upstream region |
| | | | | of cdtR gene for |
| | | | | cdtRKO, |
| | | | | cdtRstop and |
| | | | | cdtRmut |
| R_cdtRKO_ | AACTTTCAGTTTAGCGGTCT | 27 | This study | Reverse primer |
| up_Rev | GGGCGCCTAAATACCCTCCT | | | amplifying |
| | ATAAAAAATTCAAAAG | | | upstream region |
| | | | | of cdtR gene for |
| | | | | cdtRKO |
| R_cdtRKO_ | GGCGCCCAGACCGCTAAACT | 28 | This study | Forward primer |
| down_For | GAAAGTTTAAATAGAAAAA | | | amplifying |
| | AGAGATGTCTCAAGATAAG | | | downstream |
| | | | | region of cdtR |
| | | | | gene for |
| | | | | cdtRKO |
| R_cdtRKO_ | TTATTTTTATGCTAGCTCGAG | 29 | This study | Reverse primer |
| down_Rev | TAAGTCTTGTGCATAAATGT | | | amplifying |
| | TATTAGG | | | downstream |
| | | | | region of cdtR |
| | | | | gene for |
| | | | | cdtRKO |
| R_cdtRstop_ | AACTTTCAGTTTAGCGGTCT | 30 | This study | Reverse primer |
| up_Rev | GGGCGCCTTATCAAAAATTA | | | amplifying |
| | ATATATCCACTAAATACCC | | | upstream region |
| | | | | of cdtR gene for |
| | | | | cdtRstop |
| R_cdtRstop_ | GGCGCCCAGACCGCTAAACT | 31 | This study | Forward primer |
| down_For | GAAAGTTTTTTGATAACGAT | | | amplifying |
| | GTTATAAGATTATATTATAA | | | downstream |
| | | | | region of cdtR |
| | | | | gene for |
| | | | | cdtRstop |
| R_cdtRstop/ | TTATTTTTATGCTAGCTCGAG | 32 | This study | Reverse primer |
| mut_down_ | ATCTGATAAAGACCTTAAAC | | | amplifying |
| Rev | TTTTATAG | | | downstream |
| | | | | region of cdtR |
| | | | | gene for |
| | | | | cdtRstop and |
| | | | | cdtRmut |
| R_cdtRmut_ | TTATAATATAATCTTATAAC | 33 | This study | Reverse primer |
| up_Rev | ATCGTTATCAAAAATTAATA | | | amplifying |
| | TATCCACTAAATACCC | | | upstream region |
| | | | | of cdtR gene for |
| | | | | cdtRmut |
| R_cdtRmut_ | GGGTATTTAGTGGATATATT | 34 | This study | Forward primer |
| down_For | AATTTTTGATAACGATGTTA | | | amplifying |
| | TAAGATTATATTATAA | | | downstream |
| | | | | region of cdtR |
| | | | | gene for |
| | | | | cdtRmut |
| R_cdtR_sgR | aattaaactgtaaatggccaAAT | 35 | This study | Forward primer |
| NA1c_For | AATATTTTAATAAAAGAGTTTTA | | | gRNA Cloning |
| | GAGCTAGAAATAGC | | | into pCE677 |
| | | | | digested with |
| | | | | MscI and MluI |
| | | | | Universal |
| CDEP3876 | aaccatctaaaaatagttgcaga | 36 | Kaus 2020 J | Reverse primer |
| | gcttACGCGTC | | Bacteriol. | for gRNA |
| | | | | Cloning into |
| | | | | pCE677 |
| | | | | digested with |
| | | | | MscI and MluI |
| LCF0312 | AGCGGTATCGGCTTGGTTGT | 37 | This study | Verify phage |
| | AGAT | | | identity for |
| | | | | phiCD75-2 |
| LCF0313 | TGCTAGTTTCCTGTCAAGGT | 38 | This study | Verify phage |
| | CGCT | | | identity for |
| | | | | phiCD75-2 |
| LCF1242 | CGACCCACCTAAAGGTATTC | 39 | This study | Verify phage |
| | A | | | identity for |
| | | | | phiCD75-3 |
| LCF1243 | GTTCTTTAGTCCAGTTCCCAT | 40 | This study | Verify phage |
| | TTC | | | identity for |
| | | | | phiCD75-3 |

8. Generation of C. difficile cdtR Mutants Using CRISPR

[0154] CRISPR editing on C. difficile strains R20291 was performed as described in.⁶² The primers were listed in Table S1⁶³⁻⁶⁷. Briefly, donor regions for homology were generated by separately amplifying regions ˜500 bp upstream and ˜500 bp downstream of the target of interest. The resulting regions were cloned into pCE677 between NotI and XhoI sites by Gibson Assembly. Geneious Prime (v11) was used to design sgRNAs targeting each deleted target. sgRNA fragments were then amplified by PCR from pCE677, using an upstream primer that introduces the altered guide and inserted at the MscI and MluI sites of the pCE677-derivative with the appropriate homology region. Regions of plasmids constructed using PCR were verified by Sanger sequencing. Plasmids were then passaged through NEBturbo E. coli strain before transformation into Bacillus subtilis strain BS49. The CRISPR-Cas9 deletion plasmids which harbor the oriT (Tn916) origin of transfer, were then introduced into C. difficile strains by conjugation.⁶⁸ C. difficile colonies were then screened for proper mutations in the genomes by PCR and correct clones were further validated by whole-genome sequencing.

### 9. Whole-Genome Sequencing and Assembly

[0155] DNA was extracted using the QIAamp PowerFecal Pro DNA kit (Qiagen). Libraries were prepared using 100 ng of genomic DNA using the QIAseq FX DNA library kit (Qiagen). Briefly, DNA was fragmented enzymatically into smaller fragments and desired insert size was achieved by adjusting fragmentation conditions. Fragmented DNA was end repaired and ‘A's’ were added to the 3′ ends to stage inserts for ligation. During ligation step, Illumina compatible Unique Dual Index (UDI) adapters were added to the inserts and prepared library was PCR amplified. Amplified libraries were cleaned up, and QC was performed using Tapestation 4200 (Agilent Technologies). Libraries were sequenced on an Illumina NextSeq 500 or MiSeq platform to generate 2×150 or 2×250 bp reads respectively. Illumina reads were assembled into contigs using SPAdes⁶⁹ and genes were called and annotated using Prokka (v1.14.6).⁷⁰

[0156] Samples for Nanopore and Illumina hybrid assemblies were extracted using the NEB Monarch Genomic DNA Purification Kit. DNA was QC′ed using genomic Tapestation 4200. Nanopore libraries were prepared using the Ligation Sequencing Kit (SQK-LSK109), the Native Barcoding Expansions 1-12 (EXP-NBD104) and 13-24 (EXP-NBD114), and the NebNext Companion Module for Oxford Nanopore Technologies (E7180S). The shearing steps and first ethanol wash were eliminated to ensure high concentrations of long fragments. Using R9.4.1 flow cells, libraries were run on a MinION for 72 hours at −180V. The Nanopore and Illumina hybrid assemblies were completed using Unicycler (v0.4.8) 71 either with the untrimmed or trimmed Illumina reads. The assemblies with less number of circularized contigs were used for genome analysis.

### 10. Multiple Sequence Alignment for Pathogenicity Loci

[0157] Illumina whole-genome of twenty-five C. difficile strains including two reference genome: R20291 (accession: FN545816.1) and CD630 (accession: NC_009089.1), along with 23 in-house strains ST1-10, ST1-11, ST1-12, ST1-19, ST1-20, ST1-23, ST1-25, ST1-26, ST1-27, ST1-35, ST1-49, ST1-5, ST1-53, ST1-57, ST1-58, ST1-6, ST1-62, ST1-63, ST1-65, ST1-67. ST1-68, ST1-69, and ST1-75 were included in the pathogenicity locus (PaLoc) analysis. The PaLoc region of R20291 (NCBI accessions NC_013316, 706,660-725,022 bp) were extracted as the query to BLAST⁷² against a local database of all the above genomes. Hits with at least 85% query coverage and 85% percent identity were extracted and multiple sequence alignment were performed using Gencious Prime 2022.0.1 with default settings to compare their nucleotide differences.

### 11. Binary Toxin Genes Prevalence Analysis

[0158] C. difficile isolates (N=827) from BioProject PRJEB4556 were downloaded from NCBI, and assembled into contigs using SPAdes.⁶⁹ A collection of 2143 C. difficile genomes from Patric (date: Feb. 10, 2021)²³ were also downloaded. MLST was determined on those contigs by mlst.⁷³ ST type with less than 3 isolates were removed. Binary toxin cdtA, cdtB and cdtR from R20291 (NCBI accessions NC_013316) were used as query to BLAST⁷² against the assembled contigs, and hits with at least 85% identity and 85% coverage of the query are considered a valid match.

### 12. UMAP (Uniform Manifold Approximation and Projection) Analysis

[0159] A subset of isolate contigs of 199 ST1, 50 ST2, 50 ST3, 49 ST6, 50 ST8, 50 ST11, 42 ST14, 50 ST15, 50 ST17, 50 ST37 and 50 ST42, totaling 690 isolates were selected from the above Patric collection. They were all sequenced by short read technology, and they are the top 10 abundant ST groups except ST1 in the Patric collection. Genes were called and annotated from their contigs using Prokka (v1.14.6).⁷⁰ By combining the 23 isolates from this study, the inventors constructed a matrix of 731 isolates by 8025 annotated genes and hypothetical protein clusters. Specifically, hypothetical protein clusters were formed by clustering hypothetical proteins at 50% identity using cd-hit.^{74,75} Any protein sequences that were at least 50% similar fall into an artificially cluster. UMAP analysis was performed on the basis of the presence/absence of the genes/hypothetical protein clusters by setting the n_neighbors parameter to 675.

### 13. Core-Genomes SNPs Analysis on ST1 Isolates

[0160] SNP analysis was done on the 23 ST1 isolates from the collection against R20291 using snippy (v4.6.0).⁷⁶ Then the core SNP was extracted, recombination removed using gubbins (v2.4.1)⁷⁷, and a phylogenetic tree was built using fastTree (v2.1.10).^{78,79}

14. MLST1 cdtR SNPs Analysis

[0161] cdtR hits without starting position at the beginning of C. difficile contigs were chosen to further examine their nucleotide differences in cdtR gene to R20291 and ST1-75. Five such isolates were found either from Patric collection or BioProject PRJEB4556^{23,41}, and multiple sequences alignment were performed in Geneious Prime 2022.0.1 with default settings.

### 15. FastANI

[0162] Genomic similarity between clinical isolates were calculated using FastANI (v 1.32)⁸⁰ and presented as ANI score.

### 16. Pangenomic Analysis of ST1 Isolates Using Anvi'o

[0163] Fifteen circularized genomes of ST1 isolates generated by the Nanopore and Illumina hybrid assemblies were used for pangenomic analysis. Default settings were used based on the Anvi'o workflow for microbial pangenomcis with adjustments for minbit as 0.5 and mcl-inflation as 10.^{28,81-83} Annotations were performed with NCBI Clusters of Orthologous Genes (COG).⁸⁴ Accessory genomes were grouped by gene clusters that are not present in all 15 isolate genomes.

### 17. Prophage Identification Using PHASTER

[0164] Three complete prophages were identified in the genome sequence of strain ST1-75 using PHASTER.⁸⁵ Based on Blastn analyses, the phiCD75-1 prophage corresponds to phi027, a prophage highly conserved among R027 isolates.⁸⁶ The phiCD75-2 prophage is homologous at 99.82% to the well-described phiCD38-2 phage²⁹, whereas the phiCD75-3 prophage seems to be a new phage with no close homolog in public databases. The detection of ORF and gene annotation on phage genomes were performed with PROKKA 70, using an E-value threshold of 10E-3 for function assignment. The most recent PHASTER database (last update Dec. 22, 2020) was implemented into PROKKA to improve function prediction and overall annotation quality of phage proteins.⁸⁵ The genomes were reorganized so that they started with the terminase gene. Genomic maps were generated using Benchling and finalized with Inkscape v1.2.

### 18. Prophage Induction and Phage Amplification

[0165] To confirm the functionality of the phiCD75-2 and phiCD75-3 prophages, induction was performed in TY (2% yeast extract, 3% tryptose, pH 7.4) using two different strategies described previously. The first method was a treatment with 2.5 μg/mL mitomycin C (Novus Biologicals), and the second one was UV irradiation for 10 sec at a wavelength of 365 nm.⁸⁷ The induced cultures were clarified by centrifugation, then filtered on a 0.22 μm filter and the presence of infectious phage particles was confirmed by plating on bacterial lawns of the R20291 epidemic strain using a soft agar overlay method.⁸⁷ Six isolated phage plaques obtained with each induction lysate were picked, diffused in 500 μL phage buffer (50 mM Tris-HCl pH 7.5, 100 mM NaCl, 8 mM MgSO⁴) and the identity of the induced phages was determined by PCR using primers specific for phiCD75-2 and phiCD75-3. Mitomycin C treatment led to induction of the phiCD75-3 prophage whereas UV treatment led to induction of the phiCD75-2 prophage. Each phage was then plaque-purified 3 times to obtain pure phage cultures. Amplification to high titers (>10⁸ pfu/mL) was done in TY broth using strain R20291 as the host and methods described elsewhere.²⁹ Phage genomic DNA was extracted from each lysate and a restriction profile was established using XbaI and HindIII to further confirm the identity of the phages, as done before.²⁹

### 19. Creation of New Lysogens

[0166] New lysogens of strain R20291 carrying either phiCD75-2, phiCD75-3 or both phages were created using a method described before.²⁹ Briefly, soft agar overlays containing high titers (>10⁸ pfu/mL) of phage phiCD75-2, phiCD75-3, or both phages in equivalent amounts were prepared and bacterial dilutions of the wildtype R20291 strain were spread on top of the lawn. Phage-resistant colonies that grew after overnight incubation were picked, re-streaked 3 times on TY agar, and the presence of the respective prophage was detected by PCR and by confirming the phage-resistant phenotype upon re-infection with the corresponding phage(s).

### 20. Quantification and Statistical Analysis

[0167] Results represent means±SD. Statistical significance was determined by the unpaired t test and one-way ANOVA test. Statistical analyses were performed using Prism GraphPad software v9.3.1 (* p<0.05; ** p<0.01; *** p<0.001; **** p<0.0001

### 21. Data Availability

[0168] Whole-genome sequence data were uploaded to National Center for Biotechnology Information (NCBI) Sequence Read Archive (SRA) under BioProject accessions PRJNA885086 and PRJNA595724.

[0169] All of the methods disclosed and claimed herein can be made and executed without undue experimentation in light of the present disclosure. While the compositions and methods of this invention have been described in terms of preferred embodiments, it will be apparent to those of skill in the art that variations may be applied to the methods and in the steps or in the sequence of steps of the method described herein without departing from the concept, spirit and scope of the invention. More specifically, it will be apparent that certain agents which are both chemically and physiologically related may be substituted for the agents described herein while the same or similar results would be achieved. All such similar substitutes and modifications apparent to those skilled in the art are deemed to be within the spirit, scope and concept of the invention as defined by the appended claims.

### REFERENCES

[0170] The following references, to the extent that they provide exemplary procedural or other details supplementary to those set forth herein, are specifically incorporated herein by reference.
[0171] 1. Lessa, F. C., Mu, Y., Bamberg, W. M., Beldavs, Z. G., Dumyati, G. K., Dunn, J. R., Farley, M. M., Holzbauer, S. M., Meck, J. I., Phipps, E. C., et al. (2015). Burden of Clostridium difficile Infection in the United States. New England Journal of Medicine 372, 825-834, 10.1056/NEJMoa1408913.
[0172] 2. Guh, A. Y., Mu, Y., Winston, L. G., Johnston, H., Olson, D., Farley, M. M., Wilson, L. E., Holzbauer, S. M., Phipps, E. C., Dumyati, G. K., et al. (2020). Trends in U. S. Burden of Clostridioides difficile Infection and Outcomes. New England Journal of Medicine 382, 1320-1330. 10.1056/NEJMoa1910215.
[0173] 3. Abt, M. C., McKenney, P. T., and Pamer, E. G. (2016). Clostridium difficile colitis: pathogenesis and host defence. Nat. Rev. Microbiol. 14, 609-620. 10.1038/nrmicro.2016.108.
[0174] 4. Rupnik, M., Wilcox, M. H., and Gerding, D. N. (2009). Clostridium difficile infection: new developments in epidemiology and pathogenesis. Nat Rev Microbiol 7, 526-536. 10.1038/nrmicro2164.
[0175] 5. Cohen, S. H., Tang, Y. J., and Silva, J. (2000). Analysis of the pathogenicity locus in Clostridium difficile strains. J Infect Dis 181, 659-663. 10.1086/315248.
[0176] 6. Kordus, S. L., Thomas, A. K., and Lacy, D. B. (2022). Clostridioides difficile toxins: mechanisms of action and antitoxin therapeutics. Nat Rev Microbiol 20, 285-298. 10.1038/s41579-021-00660-2.
[0177] 7. Knight, D. R., Elliott, B., Chang, B. J., Perkins, T. T., and Riley, T. V. (2015). Diversity and Evolution in the Genome of Clostridium difficile. Clin Microbiol Rev 28, 721-741. 10.1128/CMR.00127-14.
[0178] 8. Rao, K., Micic, D., Natarajan, M., Winters, S., Kiel, M. J., Walk, S. T., Santhosh, K., Mogle, J. A., Galecki, A. T., LeBar, W., et al. (2015). Clostridium difficile ribotype 027: relationship to age, detectability of toxins A or B in stool with rapid testing, severe infection, and mortality. Clin Infect Dis 61, 233-241. 10.1093/cid/civ254.
[0179] 9. Sec, I., Mu, Y., Cohen, J., Beldavs, Z. G., Winston, L. G., Dumyati, G., Holzbauer, S., Dunn, J., Farley, M. M., Lyons, C., et al. (2014). NAP1 Strain Type Predicts Outcomes From Clostridium difficile Infection. Clinical Infectious Diseases 58, 1394-1400. 10.1093/cid/ciu125.
[0180] 10. Giancola, S. E., Williams, R. J., and Gentry, C. A. (2018). Prevalence of the Clostridium difficile BI/NAP1/027 strain across the United States Veterans Health Administration. Clin Microbiol Infect 24, 877-881. 10.1016/j.cmi.2017.11.011.
[0181] 11. C. difficile Infections | A. R. & Patient Safety Portal https://arpsp.cdc.gov/profile/cip/cdi.
[0182] 12. Gerding, D. N., Johnson, S., Rupnik, M., and Aktories, K. (2014). Clostridium difficile binary toxin CDT. Gut Microbes 5, 15-27. 10.4161/gmic.26854.
[0183] 13. Gargis, A. S., Karlsson, M., Paulick, A. L., Anderson, K. F., Adamczyk, M., Vlachos, N., Kent, A. G., McAllister, G., Mckay, S. L., Halpin, A. L., et al. (2022). Reference Susceptibility Testing and Genomic Surveillance of Clostridioides difficile, United States, 2012-17. Clinical Infectious Diseases, ciac817. 10.1093/cid/ciac817.
[0184] 14. Warny, M., Pepin, J., Fang, A., Killgore, G., Thompson, A., Brazier, J., Frost, E., and McDonald, L. C. (2005). Toxin production by an emerging strain of Clostridium difficile associated with outbreaks of severe disease in North America and Europe. Lancet 366, 1079-1084. 10.1016/S0140-6736 (05) 67420-X.
[0185] 15. Cloud, J., Noddin, L., Pressman, A., Hu, M., and Kelly, C. (2009). Clostridium difficile strain NAP-1 is not associated with severe disease in a nonepidemic setting. Clin Gastroenterol Hepatol 7, 868-873.c2. 10.1016/j.cgh.2009.05.018.
[0186] 16. Walk, S. T., Micic, D., Jain, R., Lo, E. S., Trivedi, I., Liu, E. W., Almassalha, L. M., Ewing, S. A., Ring. C., Galecki, A. T., et al. (2012). Clostridium difficile ribotype does not predict severe infection. Clin Infect Dis 55, 1661-1668. 10.1093/cid/cis786.
[0187] 17. Bauer, K. A., Johnston, J. E. W., Wenzler, E., Goff, D. A., Cook, C. H., Balada-Llasat, J.-M., Pancholi, P., and Mangino, J. E. (2017). Impact of the NAP-1 strain on disease severity, mortality, and recurrence of healthcare-associated Clostridium difficile infection. Anacrobe 48, 1-6. 10.1016/j.anacrobe.2017.06.009.
[0188] 18. Revolinski, S. L., and Munoz-Price, L. S. (2019). Clostridium difficile in Immunocompromised Hosts: A Review of Epidemiology, Risk Factors, Treatment, and Prevention. Clin Infect Dis 68, 2144-2153. 10.1093/cid/ciy845.
[0189] 19. Seckatz, A. M., and Young, V. B. (2014). Clostridium difficile and the microbiota. J Clin Invest 124, 4182-4189. 10.1172/JCI72336.
[0190] 20. Lewis, B. B., Carter, R. A., Ling. L., Leiner, I., Taur, Y., Kamboj, M., Dubberke, E. R., Xavier, J., and Pamer, E. G. (2017). Pathogenicity Locus, Core Genome, and Accessory Gene Contributions to Clostridium difficile Virulence. mBio 8, e00885-17. 10.1128/mBio.00885-17.
[0191] 21. Lyon, S. A., Hutton, M. L., Rood, J. I., Cheung, J. K., and Lyras, D. (2016). CdtR Regulates TcdA and TcdB Production in Clostridium difficile. PLOS Pathog 12, e1005758. 10.1371/journal.ppat. 1005758.
[0192] 22. Miles-Jay, A., Young, V. B., Pamer, E. G., Savidge, T. C., Kamboj, M., Garey, K. W., and Snitkin, E. S. (2021). A multisite genomic epidemiology study of Clostridioides difficile infections in the USA supports differential roles of healthcare versus community spread for two common strains. Microb Genom 7, 000590. 10.1099/mgen.0.000590.
[0193] 23. Wattam, A. R., Davis, J. J., Assaf, R., Boisvert, S., Brettin, T., Bun, C., Conrad, N., Dietrich, E. M., Disz, T., Gabbard, J. L., et al. (2017). Improvements to PATRIC, the all-bacterial Bioinformatics Database and Analysis Resource Center. Nucleic Acids Res. 45, D535-D542. 10.1093/nar/gkw1017.
[0194] 24. Lebeis, S. L., Bommarius, B., Parkos, C. A., Sherman, M. A., and Kalman, D. (2007). TLR signaling mediated by MyD88 is required for a protective innate immune response by neutrophils to Citrobacter rodentium. J Immunol 179, 566-577. 10.4049/jimmunol.179.1.566.
[0195] 25. Jarchum, I., Liu, M., Shi, C., Equinda, M., and Pamer, E. G. (2012). Critical role for MyD88-mediated neutrophil recruitment during Clostridium difficile colitis. Infect. Immun. 80, 2989-2996. 10.1128/IAI.00448-12.
[0196] 26. Buffic, C. G., Bucci, V., Stein, R. R., McKenney, P. T., Ling, L., Gobourne, A., No, D., Liu, H., Kinnebrew, M., Viale, A., et al. (2015). Precision microbiome reconstitution restores bile acid mediated resistance to Clostridium difficile. Nature 517, 205-208. 10.1038/nature13828.
[0197] 27. Reeves, A. E., Koenigsknecht, M. J., Bergin, I. L., and Young, V. B. (2012). Suppression of Clostridium difficile in the gastrointestinal tracts of germfree mice inoculated with a murine isolate from the family Lachnospiraceae. Infect Immun 80, 3786-3794. 10.1128/IAI.00647-12.
[0198] 28. Eren, A. M., Kiefl, E., Shaiber, A., Veseli, I., Miller, S. E., Schechter, M. S., Fink, I., Pan, J. N., Yousef, M., Fogarty, E. C., et al. (2021). Community-led, integrated, reproducible multi-omics with anvi'o. Nat Microbiol 6, 3-6. 10.1038/s41564-020-00834-3.
[0199] 29. Sekulovic, O., Meessen-Pinard, M., and Fortier, L.-C. (2011). Prophage-stimulated toxin production in Clostridium difficile NAP1/027 lysogens. J Bacteriol 193, 2726-2734. 10.1128/JB.00787-10.
[0200] 30. Sekulovic, O., Ospina Bedoya, M., Fivian-Hughes, A. S., Fairweather, N. F., and Fortier, L.-C. (2015). The Clostridium difficile cell wall protein CwpV confers phase-variable phage resistance. Mol Microbiol 98, 329-342. 10.1111/mmi.13121.
[0201] 31. Nale, J. Y., Spencer, J., Hargreaves, K. R., Buckley, A. M., Trzepiński, P., Douce, G. R., and Clokie, M. R. J. (2016). Bacteriophage Combinations Significantly Reduce Clostridium difficile Growth In Vitro and Proliferation In Vivo. Antimicrobial Agents and Chemotherapy 60, 968-981. 10.1128/AAC.01774-15.
[0202] 32. Shan, J., Ramachandran, A., Thanki, A. M., Vukusic, F. B. I., Barylski, J., and Clokic, M. R. J. (2018). Bacteriophages are more virulent to bacteria with human cells than they are in bacterial culture; insights from HT-29 cells. Sci Rep 8, 5091. 10.1038/s41598-018-23418-y.
[0203] 33. Fortier, L.-C. (2018). Bacteriophages Contribute to Shaping Clostridioides (Clostridium) difficile Species. Front Microbiol 9, 2033. 10.3389/fmich.2018.02033.
[0204] 34. Heuler, J., Fortier, L.-C., and Sun, X. (2021). Clostridioides difficile phage biology and application. FEMS Microbiol Rev 45, fuab012. 10.1093/femsre/fuab012.
[0205] 35. Carter, G. P., Lyras, D., Allen, D. L., Mackin, K. E., Howarth, P. M., O'Connor, J. R., and Rood, J. I. (2007). Binary toxin production in Clostridium difficile is regulated by CdtR, a LytTR family response regulator. J Bacteriol 189, 7290-7301. 10.1128/JB.00731-07.
[0206] 36. Govind, R., and Dupuy, B. (2012). Secretion of Clostridium difficile toxins A and B requires the holin-like protein TcdE. PLOS Pathog 8, e1002727. 10.1371/journal.ppat. 1002727.
[0207] 37. Tan, K. S., Wec, B. Y., and Song. K. P. (2001). Evidence for holin function of tcdE gene in the pathogenicity of Clostridium difficile. J Med Microbiol 50, 613-619. 10.1099/0022-1317-50-7-613.
[0208] 38. Govind, R., Fitzwater, L., and Nichols, R. (2015). Observations on the Role of TedE Isoforms in Clostridium difficile Toxin Secretion. J Bacteriol 197, 2600-2609. 10.1128/JB.00224-15.
[0209] 39. Dupuy, B., Raffestin, S., Matamouros, S., Mani, N., Popoff, M. R., and Sonenshein, A. L. (2006). Regulation of toxin and bacteriocin gene expression in Clostridium by interchangeable RNA polymerase sigma factors. Mol Microbiol 60, 1044-1057. 10.1111/j.1365-2958.2006.05159.x.
[0210] 40. Mani, N., Lyras, D., Barroso, L., Howarth, P., Wilkins, T., Rood, J. I., Sonenshein, A. L., and Dupuy, B. (2002). Environmental response and autoregulation of Clostridium difficile TxeR, a sigma factor for toxin gene expression. J Bacteriol 184, 5971-5978. 10.1128/JB.184.21.5971-5978.2002.
[0211] 41. Eyre, D. W., Cule, M. L., Wilson, D. J., Griffiths, D., Vaughan, A., O'Connor, L., Ip, C. L. C., Golubchik, T., Batty, E. M., Finney, J. M., et al. (2013). Diverse sources of C. difficile infection identified on whole-genome sequencing. N Engl J Med 369, 1195-1205. 10.1056/NEJMoa1216064.
[0212] 42. Bilverstone, T. W., Minton, N. P., and Kuchne, S. A. (2019). Phosphorylation and functionality of CdtR in Clostridium difficile. Anaerobe 58, 103-109. 10.1016/j.anaerobc.2019.102074.
[0213] 43. Chen, R., Feng. Y., Wang, X., Yang, J., Zhang, X., Lü, X., and Zong, Z. (2017). Whole genome sequences of three Clade 3 Clostridium difficile strains carrying binary toxin genes in China. Sci Rep 7, 43555. 10.1038/srep43555.
[0214] 44. Barbut, F., Decré, D., Lalande, V., Burghoffer, B., Noussair, L., Gigandon, A., Espinasse, F., Raskine, L., Robert, J., Mangcol, A., et al. (2005). Clinical features of Clostridium difficile-associated diarrhoca due to binary toxin (actin-specific ADP-ribosyltransferase)-producing strains. J Med Microbiol 54, 181-185. 10.1099/jmm.0.45804-0.
[0215] 45. Young, M. K., Leslie, J. L., Madden, G. R., Lyerly, D. M., Carman, R. J., Lyerly, M. W., Stewart, D. B., Abhyankar, M. M., and Petri, W. A. (2022). Binary Toxin Expression by Clostridioides difficile Is Associated With Worse Disease. Open Forum Infect Dis 9, ofac001. 10.1093/ofid/ofac001.
[0216] 46. Carter, G. P., Chakravorty, A., Pham Nguyen, T. A., Mileto, S., Schreiber, F., Li, L., Howarth, P., Clare, S., Cunningham, B., Sambol, S. P., et al. (2015). Defining the Roles of TedA and TcdB in Localized Gastrointestinal Disease, Systemic Organ Damage, and the Host Response during Clostridium difficile Infections. mBio 6, c00551. 10.1128/mBio.00551-15.
[0217] 47. Cowardin, C. A., Buonomo, E. L., Salch, M. M., Wilson, M. G., Burgess, S. L., Kuchne, S. A., Schwan, C., Eichhoff. A. M., Koch-Nolte, F., Lyras, D., et al. (2016). The binary toxin CDT enhances Clostridium difficile virulence by suppressing protective colonic cosinophilia. Nat Microbiol l, 16108. 10.1038/nmicrobiol.2016.108.
[0218] 48. Metcalf, D. S., and Weese, J. S. (2011). Binary toxin locus analysis in Clostridium difficile. J Med Microbiol 60, 1137-1145. 10.1099/jmm.0.028498-0.
[0219] 49. Kuchne, S. A., Cartman, S. T., Heap, J. T., Kelly, M. L., Cockayne, A., and Minton, N. P. (2010). The role of toxin A and toxin B in Clostridium difficile infection. Nature 467, 711-713. 10.1038/nature09397.
[0220] 50. Alonso, C. D., Pollock, N. R., Garcy, K. W., Gonzales-Luna, A. J., Williams, D. N., Daugherty, K., Cuddemi, C., Villafuerte-Gálvez, J., White, N. C., Chen, X., et al. (2022). Higher In Vivo Fecal Concentrations of Clostridioides difficile Toxins A and B in Patients With North American Pulsed-Field Gel Electrophoresis Type 1/Ribotype 027 Strain Infection. Clin Infect Dis 75, 2019-2022. 10.1093/cid/ciac406.
[0221] 51. Alonso, C. D., Kelly, C. P., Garey, K. W., Gonzales-Luna, A. J., Williams, D., Daugherty, K., Cuddemi, C., Villafuerte-Gálvez, J., White, N. C., Chen, X., et al. (2022). Ultrasensitive and Quantitative Toxin Measurement Correlates With Baseline Severity, Severe Outcomes, and Recurrence Among Hospitalized Patients With Clostridioides difficile Infection. Clin Infect Dis 74, 2142-2149. 10.1093/cid/ciab826.
[0222] 52. Guh, A. Y., Hatfield, K. M., Winston, L. G., Martin, B., Johnston, H., Brousseau, G., Farley, M. M., Wilson, L., Perlmutter, R., Phipps, E. C., et al. (2019). Toxin Enzyme Immunoassays Detect Clostridioides difficile Infection With Greater Severity and Higher Recurrence Rates. Clinical Infectious Diseases 69, 1667-1674. 10.1093/cid/ciz009.
[0223] 53. Gálvez, J. A. V., Pollock, N. R., Alonso, C. D., Chen, X., Xu, H., Wang, L., White, N., Banz, A., Miller, M., Daugherty, K., et al. (2022). Stool interleukin-1ß differentiates Clostridioides difficile infection from asymptomatic carriage and non-C. difficile infection diarrhea. Clin Infect Dis, ciac624. 10.1093/cid/ciac624.
[0224] 54. Govind, R., Vediyappan, G., Rolfe, R. D., Dupuy, B., and Fralick, J. A. (2009). Bacteriophage-Mediated Toxin Gene Regulation in Clostridium difficile. J Virol 83, 12037-12045. 10.1128/JVI.01256-09.
[0225] 55. Goh, S., Chang, B. J., and Riley, T. V. (2005). Effect of phage infection on toxin production by Clostridium difficile. J Med Microbiol 54, 129-135. 10.1099/jmm.0.45821-0.
[0226] 56. Hargreaves, K. R., Kropinski, A. M., and Clokic, M. R. J. (2014). What does the talking?: quorum sensing signalling genes discovered in a bacteriophage genome. PLOS One 9, c85131. 10.1371/journal.pone.0085131.
[0227] 57. Nale, J. Y., Chutia, M., Carr, P., Hickenbotham, P. T., and Clokic, M. R. J. (2016). “Get in Early”; Biofilm and Wax Moth (Galleria mellonella) Models Reveal New Insights into the Therapeutic Potential of Clostridium difficile Bacteriophages. Front Microbiol 7, 1383. 10.3389/fmich.2016.01383.
[0228] 58. Griffiths, D., Fawley, W., Kachrimanidou, M., Bowden, R., Crook, D. W., Fung, R., Golubchik, T., Harding, R. M., Jeffery, K. J. M., Jolley, K. A., et al. (2010). Multilocus Sequence Typing of Clostridium difficile. Journal of Clinical Microbiology 48, 770-778. 10.1128/JCM.01796-09.
[0229] 59. Sorg. J. A., and Sonenshein, A. L. (2008). Bile salts and glycine as cogerminants for Clostridium difficile spores. J Bacteriol 190, 2505-2512. 10.1128/JB.01765-07.
[0230] 60. Abt, M. C., Lewis, B. B., Caballero, S., Xiong, H., Carter, R. A., Sušac, B., Ling. L., Leiner, I., and Pamer, E. G. (2015). Innate Immune Defenses Mediated by Two ILC Subsets Are Critical for Protection against Acute Clostridium difficile Infection. Cell Host Microbe 18, 27-37. 10.1016/j.chom.2015.06.011.
[0231] 61. Keith, J. W., Dong, Q., Sorbara, M. T., Becattini, S., Sia, J. K., Gjonbalaj, M., Scok, R., Leiner, I. M., Littmann, E. R., and Pamer, E. G. (2020). Impact of Antibiotic-Resistant Bacteria on Immune Activation and Clostridioides difficile Infection in the Mouse Intestine. Infect Immun 88, c00362-19. 10.1128/IAI.00362-19.
[0232] 62. Kaus, G. M., Snyder, L. F., Müh, U., Flores, M. J., Popham, D. L., and Ellermeier, C. D. (2020). Lysozyme Resistance in Clostridioides difficile Is Dependent on Two Peptidoglycan Deacetylases. J Bacteriol 202, c00421-20. 10.1128/JB.00421-20.
[0233] 63. Edwards, A. N., Krall, E. G., and McBride, S. M. (2020). Strain-Dependent RstA Regulation of Clostridioides difficile Toxin Production and Sporulation. J Bacteriol 202, c00586-19. 10.1128/JB.00586-19.
[0234] 64. Angione, S. L., Sarma, A. A., Novikov, A., Seward, L., Fieber, J. H., Mermel, L. A., and Tripathi, A. (2014). A novel subtyping assay for detection of Clostridium difficile virulence genes. J Mol Diagn 16, 244-252. 10.1016/j.jmoldx.2013.11.006.
[0235] 65. Babakhani, F., Bouillaut, L., Scars, P., Sims, C., Gomez, A., and Sonenshein, A. L. (2013). Fidaxomicin inhibits toxin production in Clostridium difficile. Journal of Antimicrobial Chemotherapy 68, 515-522. 10.1093/jac/dks450.
[0236] 66. Wroblewski, D., Hannett, G. E., Bopp, D. J., Dumyati, G. K., Halse, T. A., Dumas, N. B., and Musser, K. A. (2009). Rapid molecular characterization of Clostridium difficile and assessment of populations of C. difficile in stool specimens. J Clin Microbiol 47, 2142-2148. 10.1128/JCM.02498-08.
[0237] 67. Metcalf. D., Sharif, S., and Weese, J. S. (2010). Evaluation of candidate reference genes in Clostridium difficile for gene expression normalization. Anaerobe 16, 439-443. 10.1016/j.anaerobe.2010.06.007.
[0238] 68. McAllister, K. N., Bouillaut, L., Kahn, J. N., Self, W. T., and Sorg. J. A. (2017). Using CRISPR-Cas9-mediated genome editing to generate C. difficile mutants defective in selenoproteins synthesis. Sci Rep 7, 14672. 10.1038/s41598-017-15236-5.
[0239] 69. Prjibelski, A., Antipov, D., Meleshko, D., Lapidus, A., and Korobeynikov, A. (2020). Using SPAdes De Novo Assembler. Curr Protoc Bioinformatics 70, e102. 10.1002/cpbi.102.
[0240] 70. Seemann, T. (2014). Prokka: rapid prokaryotic genome annotation. Bioinformatics 30, 2068-2069. 10.1093/bioinformatics/btu153.
[0241] 71. Wick, R. R., Judd, L. M., Gorrie, C. L., and Holt, K. E. (2017). Unicycler: Resolving bacterial genome assemblies from short and long sequencing reads. PLOS Comput Biol 13, e1005595. 10.1371/journal.pcbi. 1005595.
[0242] 72. Camacho, C., Coulouris, G., Avagyan, V., Ma, N., Papadopoulos, J., Bealer, K., and Madden, T. L. (2009). BLAST+: architecture and applications. BMC Bioinformatics 10, 421. 10.1186/1471-2105-10-421.
[0243] 73. Seemann, T. (2023). mlst.
[0244] 74. Li, W., and Godzik, A. (2006). Cd-hit: a fast program for clustering and comparing large sets of protein or nucleotide sequences. Bioinformatics 22, 1658-1659. 10.1093/bioinformatics/bt1158.
[0245] 75. L. F., B. N., Z. Z., S. W., and W. L. (2012). CD-HIT: accelerated for clustering the next-generation sequencing data. Bioinformatics (Oxford, England) 28. 10.1093/bioinformatics/bts565.
[0246] 76. Seemann. T. (2023). Snippy.
[0247] 77. Croucher, N. J., Page, A. J., Connor, T. R., Delaney, A. J., Keane, J. A., Bentley, S. D., Parkhill, J., and Harris, S. R. (2015). Rapid phylogenetic analysis of large samples of recombinant bacterial whole genome sequences using Gubbins. Nucleic Acids Res 43, e15. 10.1093/nar/gku1196.
[0248] 78. Price, M. N., Dehal, P. S., and Arkin, A. P. (2009). FastTree: computing large minimum evolution trees with profiles instead of a distance matrix. Mol Biol Evol 26, 1641-1650. 10.1093/molbev/msp077.
[0249] 79. Price, M. N., Dehal, P. S., and Arkin, A. P. (2010). FastTree 2—approximately maximum-likelihood trees for large alignments. PLOS One 5, e9490. 10.1371/journal.pone.0009490.
[0250] 80. Jain, C., Rodriguez-R, L. M., Phillippy, A. M., Konstantinidis, K. T., and Aluru, S. (2018). High throughput ANI analysis of 90K prokaryotic genomes reveals clear species boundaries. Nat Commun 9, 5114. 10.1038/s41467-018-07641-9.
[0251] 81. Buchfink, B., Xie, C., and Huson, D. H. (2015). Fast and sensitive protein alignment using DIAMOND. Nat Methods 12, 59-60. 10.1038/nmeth.3176.
[0252] 82. van Dongen, S., and Abreu-Goodger, C. (2012). Using MCL to extract clusters from networks. Methods Mol Biol 804, 281-295. 10.1007/978-1-61779-361-5_15.
[0253] 83. Benedict, M. N., Henriksen, J. R., Metcalf, W. W., Whitaker, R. J., and Price, N. D. (2014). ITEP: An integrated toolkit for exploration of microbial pan-genomes. BMC Genomics 15, 8. 10.1186/1471-2164-15-8.
[0254] 84. Galperin, M. Y., Makarova, K. S., Wolf, Y. I., and Koonin, E. V. (2015). Expanded microbial genome coverage and improved protein family annotation in the COG database. Nucleic Acids Res 43, D261-269. 10.1093/nar/gku1223.
[0255] 85. Arndt, D., Grant, J. R., Marcu, A., Sajed, T., Pon, A., Liang, Y., and Wishart, D. S. (2016). PHASTER: a better, faster version of the PHAST phage search tool. Nucleic Acids Res 44, W16-21. 10.1093/nar/gkw387.
[0256] 86. Sekulovic, O., and Fortier, L.-C. (2015). Global transcriptional response of Clostridium difficile carrying the CD38 prophage. Appl Environ Microbiol 81, 1364-1374. 10.1128/AEM.03656-14.
[0257] 87. Sekulović, O., and Fortier, L.-C. (2016). Characterization of Functional Prophages in Clostridium difficile. In Clostridium difficile: Methods and Protocols Methods in Molecular Biology., A. P. Roberts and P. Mullany, eds. (Springer), pp. 143-165. 10.1007/978-1-4939-6361-4_11.

What is claimed is:

1. A method for treating and/or preventing C. difficile pathogenesis, the method comprising administering to a patient a C. difficile cell having a reduced cdtR protein expression relative to a wild type C. difficile.

2. A method for treating and/or preventing C. difficile pathogenesis, the method comprising administering to a patient a C. difficile cell that expresses a mutant cdtR protein.

3. A method for treating and/or preventing C. difficile pathogenesis, the method comprising administering to a patient a C. difficile cell that does not express a functional cdtR protein.

4. The method of any of claims 1-3, wherein the C. difficile cell has a mutant cdtR gene relative to wild type C. difficile.

5. The method of claim 4, wherein the mutant comprises a nonsense mutation.

6. The method of claim 4 or 5, where the mutant comprises a single nucleotide variation.

7. The method of any one of claims 4-6, wherein the mutant comprises a deletion.

8. The method of any of claims 1-7, wherein the C. difficile cell is an engineered C. difficile cell.

9. The method of any of claims 1-7, wherein the C. difficile cell is C. difficile ST1-75 (ATCC Deposit Number PTA-127589).

10. The method of any of claims 1-7, wherein the C. difficile cell is C. difficile ST1-35 (ATCC Deposit Number PTA-127588).

11. The method of any one of claims 1-7, wherein the C. difficile cell is C. difficile cdtRmut6.1

12. The method of any one of claims 1-7, wherein the C. difficile cell is C. difficile cdtRmut8.1

13. The method of any of claims 1-10, further comprising administering to the subject at least one additional C. difficile cell.

14. The method of claim 13, wherein the additional C. difficile cell is C. difficile ST1-75 (ATCC Deposit Number PTA-127589), C. difficile ST1-35 (ATCC Deposit Number PTA-127588), C. difficile cdtRmut6.1, or C. difficile cdtRmut8.1.

15. The method of any of claims 1-14, further comprising administering to the subject one or more antibiotics after administering the C. difficile cell.

16. A method for preventing C. difficile pathogenesis, the method comprising administering to a patient C. difficile ST1-75 (ATCC Deposit Number PTA-127589).

17. A method for preventing C. difficile pathogenesis, the method comprising administering to a patient C. difficile ST1-35 (ATCC Deposit Number PTA-127588).

18. A method for treating pathogenic C. difficile infection, the method comprising administering to a patient C. difficile ST1-75 (ATCC Deposit Number PTA-127589).

19. A method for treating pathogenic C. difficile infection, the method comprising administering to a patient C. difficile ST1-35 (ATCC Deposit Number PTA-127588).

20. A method for preventing C. difficile pathogenesis, the method comprising administering to a patient C. difficile cdtRmut6.1.

21. A method for preventing C. difficile pathogenesis, the method comprising administering to a patient C. difficile cdtRmut8.1.

22. A method for treating pathogenic C. difficile infection, the method comprising administering to a patient C. difficile cdtRmut6.1.

23. A method for treating pathogenic C. difficile infection, the method comprising administering to a patient C. difficile cdtRmut8.1.

24. A Clostridioides difficile (C. difficile) cell that expresses a mutant cdtR protein.

25. A C. difficile cell having a reduced cdtR protein expression relative to a wild type C. difficile.

26. A C. difficile cell that does not express a functional cdtR protein.

27. The C. difficile cell of any of claims 24-26, wherein the C. difficile cell has a mutant cdtR gene relative to wild type C. difficile.

28. The C. difficile cell of claim 27, wherein the mutant comprises a nonsense mutation.

29. The C. difficile cell of claim 27 or 28, where the mutant comprises a single nucleotide variation.

30. The C. difficile cell of any one of claims 27-29, wherein the mutant comprises a deletion.

31. The C. difficile cell of any of claims 24-30, wherein the C. difficile cell is an engineered C. difficile cell.

32. A method for treating and/or preventing C. difficile pathogenesis, the method comprising administering to a patient the C. difficile cell of any of claims 24-31.

33. The method of claim 32, further comprising administering to the subject one or more antibiotics after administering the C. difficile cell.

34. A composition comprising two or more of C. difficile ST1-75 (ATCC Deposit Number PTA-127589), C. difficile ST1-35 (ATCC Deposit Number PTA-127588), C. difficile cdtRmut6.1, and C. difficile cdtRmut8.1.

35. A method for analyzing virulence of a bacteria strain present in an infection in a patient, the method comprising identifying a cdtR gene in the bacteria strain.

36. The method of claim 35, wherein the bacteria strain is a C. difficile bacteria strain.

37. The method of claim 35 or 36, wherein the cdtR gene is a cdtR gene present in a virulent bacteria strain.

38. The method of any one of claims 35-37, wherein the cdtR gene is a wild-type cdtR gene.

39. The method of any one of claims 35-38, wherein the C. difficile bacteria strain is R20291.

40. The method of any one of claims 35-37, wherein the cdtR gene is a mutant cdtR gene relative to a wild type cdtR gene in C. difficile.

41. The method of claim 40, wherein the mutant comprises a nonsense mutation.

42. The method of claim 40 or 41, where the mutant comprises a single nucleotide variation.

43. The method of any one of claims 40-42, wherein the mutant comprises a deletion.

44. The method of any one of claims 35-43, wherein the infection is present in the colon of the patient.

45. The method of any one of claims 35-44, wherein the identifying step comprises sequencing.

46. The method of any one of claims 35-45, wherein the identifying step comprises PCR.

47. The method of any one of claims 35-46, wherein the identifying step comprises comparing the cdtR gene identified to a standard.

48. The method of any one of claims 35-47, wherein the method further comprises administering a therapeutic intervention to the patient.

49. The method of claim 48, wherein the therapeutic intervention comprises the C. diff cell of any one of claims 24-31 or the composition of claim 34.

50. The method of claim 48 or 49, wherein the therapeutic intervention comprises an antibiotic.

51. A method of treating a bacterial infection in a patient, the method comprising administering a therapeutic intervention to the patient, wherein a cdtR gene has been identified in the bacterial infection.

52. The method of claim 51, wherein the therapeutic intervention comprises the C. diff cell of any one of claims 24-31 or the composition of claim 34.

53. The method of claim 51 or 52, wherein the therapeutic intervention comprises an antibiotic.

54. The method of any one of claims 51-53, wherein the cdtR gene identified in the bacterial infection is a wild-type cdtR gene.

55. The method of any one of claims 51-54, wherein the cdtR gene identified in the bacterial infection is a cdtR gene found in a virulent C. difficile strain.

56. The method of any one of claims 51-55, wherein the bacterial infection comprises R20291.

57. A method of reducing virulence of a bacterium, the method introducing a cdtR mutant gene to the bacterium.

58. The method of claim 57, wherein the mutant gene comprises a nonsense mutation.

59. The method of claim 57 or 58, where the mutant gene comprises a single nucleotide variation.

60. The method of any one of claims 57-59, wherein the mutant gene comprises a deletion.

61. The method of any one of claims 57-60, wherein the bacterium is a C. difficile bacterium.

62. The method of any one of claims 57-61, wherein the bacterium is R20291.

63. The method of any one of claims 57-62, wherein the cdtR mutant gene is introduced by infecting the bacterium with a bacteriophage that encodes the cdtR mutant gene.

64. The method of any one of claims 57-63, wherein the cdtR mutant gene is introduced by engineering the bacterium.

65. The method of claim 64, wherein the engineering comprises knocking out the wild-type cdtR gene.

66. The method of claim 64, wherein the engineering comprises mutating the cdtR gene.

67. The method of any one of claims 64-66, wherein the engineering comprises editing the wild-type cdtR gene by CRISPR-mediated genome editing.

68. A bacteriophage comprising an engineered genome encoding a cdtR mutant gene.

69. The bacteriophage of claim 68, wherein the mutant gene comprises a nonsense mutation.

70. The bacteriophage of claim 68 or 69, where the mutant gene comprises a single nucleotide variation.

71. The bacteriophage of any one of claims 68-70, wherein the mutant gene comprises a deletion.

72. The bacteriophage of any one of claims 68-71, wherein the bacteriophage is derived from phiCD75-2 and/or phiCD75-3.

The application's sequence listing, which the Patent Office published only in electronic form, follows.

SEQUENCE LISTING (40 sequences)

SEQ ID NO: 1 - DNA, 4188856 bp, Clostridium difficile (residues 1-2,094,428 of 4,188,856)
  source 1..4188856: mol_type = genomic DNA
atggatatagtttctttatgggacaaaaccctacaattaataaaaggtgacttaacttcagtaagttttaataccttttttaaaaacatcgtaccattaaaaatacatcttaatgatttaatcttactggctcctagtgattttaataaagatatcttagagaatagatatttacatttaattgaagatgctattagtcaactgtcattaaaaaaatataatattaaatttgtattgagcgaaaaagaggttgctgatttaaattctgatagcacagatttaaattatagagttctttaccccaatctaaatccaaaatacacatttgatacattcgttattggtaatagcaatagatttgcacatgctgcatgcgttgcagttgcagaatctccagctaaagcttataacccactttttttgtatggaggagttggattaggtaagactcacctaatgcatgctataggtcatcatattgttagtcaaaaaaaagactcaaaagtagtttacgtttcttcagaaaaatttactaatgaacttataaactctataaaagacgataaaaacgaagaatttaggaataaatatagaaacgtagatgtattactaatcgacgatattcaatttatagcaggaaaagaaagaactcaagaagagtttttccatacattcaatactcttcatgaagcaaacaaacaaataattatatctagtgatagaccgccaaaagacatacctacactagaagataggctaagatcgagatttgaaatgggacttataactgatattcaagcacctgactttgagacaagaattgctatacttagaaaaaaggctcaactagaacgtatagatgtgccaaatgaggttatgtcatatatagcaaaaaatattaagtcaaacataagggaactagaaggtgcattaactagagtggttgcttattcttctcttagcaatagggtaatatcttttgatcttgctacagaagctttaaaagatattataacaacttctaaaaatgaagaaataaatgttcttagaataaaagaaaaagtatcttctgtattcaatttaaagatggaagattttaattctaaaaaaagaacacgttcaatagcttatccaagacagatagctatgtatttaacgcgcgagcttactgatttatcccttcctaaaataggtgaagagtttgggggtagagaccatacaacagtaattcatgctcatgacaaagtatctaaggatatagaagaaagtgaagaaattaagactaaaatagacaaaattatatcagatttgaagggataatttatacacaattgtatgtttatatctcttgaataacctgttaatactttttttgaacaaaaattattaacaaattatcaagtctaaaataacaaagatattaacatcttatacacatgttaatatctttgtatttataatgttatacatacttattaacattatcaacaacacctactactattactactatgattttaacttatttttatatataaaaagccagaggaggttatccacattgaaaataatttgtaatcaaaaaatcctagcaaatagaattggaattgctcaaaaagctattaatggaaaaacaacaatagaattattaaaaggtatacttatatctacagaagaaggtcaattaaaacttactggatatgatgctgaaataggaatagaaacttatgtacaagcagaaatcatagaaaaaggtgatgttgttgtagatgcaaggctatttggagatataattagaaaattaccagattcctttgttgagatagaaactgattcagaaaataatatttacataaattgtgtaaattcaagatttaaaattaaaggttatgcagcaaaagaatttcctaaattaccagaattaaatgaagaagatttatatagcatacctcaagaaattctaaaaaatatgattaaacaaactgtatttgctatctcacaggaccaaacaaaacctgttttaatgggagaacttttagaaattgtagatagaaacttaaatttagtagcaattgatggatatagattagctgtaaaaagttgttcagttgatagtttaattgaaaatataaaagtcataattcctggaaagacacttatagatgtaaatagtttgctttctggagaggataatgttaaagttgggtttaacgaaaaaaatgctatttttataattaatgatacgaaaattattacaagattgcttgaaggagattttattgattataaaaaattattgccaagagaacataacagcagagttaaattaaacactaaggaacttttaaatagtatagagagagcgtctttattgtctcaatcagaaaaaaataatcttataaagttatctataagagataaagtaatggcaattacttctaacacagaaaaaggaaatgtgtatgaagaagttgaaatagatttagatggagattacctagatatagctttcaattctagatattttatcgaaggtttgaaaaatatagataatgaggaaatatttatagaatttactacaaatgtaaatccttgtataattaaaccaacagatgatgttaattatatttacttactgcttccagtaagaatatcatcaaatatatagcagacatgaaggagttgtcttttgtagaaaatttttctaatcttagacaactccttttataagcatatttatggtataatatacttttagtgtatcaataggaatttgtttaaaatagtgacaaggaggaactattatgactgaaataactatagaatcagaatatataaagttggatcaatttcttaaattagcagagattgcatcaacaggaggtcatgcaaaatttttaattcaagaaggtttagtgacagtaaatgatgaaatagaattaagaagaggaaaaaagataaaatcaggagatatagttaaaatagaaggaactaaaataaaagtattgtaaaaaaaggagaactttttgtgaaacttaaaagtttgcaacttgttaattttagaaattataaaaagttgcatctggaatttaatgggaaagtaaatctacttgttggtaaaaatggtcaaggaaagacaaatatagtagaatctatttatatgctttcttttggaaaatcatttaggactaacaaagataaagaaatggttagatttaatagtgaaaacttatacattggaggaagtttttcaaaatataataaatatagtctaatagagctaattattggaaaagataaaaaggggataagaataaataaagttcctttacaaaagatacaagaactacttggcaacttaaatgttgttatattttctcctgaagatttaaggttggttaaagagggtcctaaagaaagaagggcatttatagacaaagagattagtcagattatacctaaatattataaatatcttaccaattataataaaacactttctcaaaggagtagggtgcttaaaaatatacatgttgatgaagctttattagatgtatatgatgatacgttagcaaagtatggaagttatatttatattttgcgtagagactttataaaaaagatagctaatatatctgaaaatatgcatatgaatttgactaatggagttgaaagattatcaattcgatataaaaatcaaataaatataactgatgaagatactatagatacagtatataataaatttttagccaagttgtcatcgaatagacctaatgatatagaatctaagactaccagatatggtatacacaaagatgacttaaatatattcataaatgatttagatgcaagactttttggttcacaaggtcaacaaagaactgcttcaatatcattaaagttatcagagatagaattaataaaaaatgaagttgaagaatatccagtattaattttagatgatgtttttagtgagttagatgaagcaagacaaaaacttttagtaaataatttaagcaatgttcaaatgtttataacaagtgctgaagtttcacataaaaaaatatttgatgaaaaaaatgttacaatatttaatattgaaaatggcgatgttattagcatagagaatggaggaaattaaatgaaacaagaatacggtgcaagtcagatacaagtattagagggattagaagccgttagaaaaagaccaggtatgtatattggtagtacaagccctagaggtttacatcacttagtttatgaagttgtagataatagtatagatgaggctttacaaggatattgttcagacatatatgtatctattaatgaagatggcagtgttttagtaaaagataacggaagaggtatacctgttgaaatacatcctaaaactggtaaatcaactttagaaacagtattaactaatcttcatgcaggaggaaagtttggaggcggaggatataaagtatctggaggtcttcatggagttggtgtttctgtagttaatgcattgtcaaaatggatggtagcagaggtttatttaaacggaaagatatataagcagacatatgagaaaggattaccaacatctaagcttgaagtagttggagaatctcaagataaaggaacaatgattcaatttatgccagatgagacaatatttgatgaaatagagtttaaatatgaaacattggagtataggcttagagaactttctttcttgaataaaggaataaaaatagtatttgaagataaaagagaaggacaagaaaaaagaaaagaatttcactatacaggtggtttggtagaatatattaagtatttaaataaatctagaactggtatacatgatgacatagtttatatagataaaaaggttgatgattgttttgttgaactagctatgcaatatacagatggttatacagagaacatatattcttttgcaaacaatataaatacacacgaaggtggttctcatttaagtggatttaaagcagctcttactaaaactgtaaatgattatgctaagagaaataaatttttaaaggaaaatgatgttaacctacttggtgaagacataagagaaggtcttacagcagtagtatcagttaaattaccagaacctcaatttgaaggtcaaactaaaacaaagctaggtaatagctttatgagaggtatagttgatagtgtaacagttgatgaactggggtctttcctagaagaaaacccatcaacagcaagaatcatagttgataaagctttaagagcacaaagagctagagaagctgcaaaaaaagcaagagaattaacaaggagaaaaagtgtattagaaagtacatctttacctggaaaacttgcagattgtgcagaaaaagatccatctaaaagtgaaatattcttagtcgaaggggattcagcgggaggttcagctaaacaaggtagagatagaaatagtcaagctatacttccattaagagggaaaatacttaatgttgagaaatcaagactagataggatactatcttcagatgaaataaaaaatatgataacagcttatggttgtggtattggagaagattttgatatagataaggctaggtatcataaaattataattatgaccgatgctgatgtagatggagcccatataagaactttattattaacattcttctttagatatatgagacctcttatagatgaggggtatgtttatgcagcacagccacctttatataaagtgacaaagcaaaagaaggaacattatgtttactcagataaagagttaaatatcttattagatgaaattggaagaaatggtgttgaacttcaaaggtacaaaggtcttggagagatgaatgcagagcaattatgggaaacaactatgaatcctgagacaagaactttattacaagttactgtagaagatgctgcaattgcagatgaagtattttcaatgcttatgggtgataaggttgctccaagaaaagaatttatagaagaaaatgcaagatttgttagaaatttagatatatagagagaggggattagtatacatggaagaaaataacaaaatactccctattgaaatagcggaagaaatgaaaaaatcgtatattgattattcaatgagtgttatagctggacgtgctcttcctgatgttagagatggtttaaagccagttcatagaagaatattatattcaatgagtgagttaaatttaactccagataaaccatacaggaagtcagctcgtattgttggggacgttttaggtaagtaccatcctcatggagatactgctgtttattatgctatggtaagaatggcacaagatttttcaactagagcacttttagtagatggtcatggtaactttggttctgttgatggggattcaccagctgctatgcgttatacagaagctaaaatgagtaaattatcattagaactactgagagatattgaaaaggaaactgtagactttaaaccaaactttgatgagtcgttaaaagagccttcagtattgccagctagatatcctaatttattagtaaatggctcaaatggtatagctgttggtatggcaacttcaatacctccacataatttagcagaagtaattgatgcaactgtatatttgatagataatccagagtgtagtgtagatgatttaataaaatttgttcaaggaccagatttccctacagctgcaattataatgggaaaagaaagtatagcagaagcatacagaactggaagaggaaaagttaaagttaggtctagagcttttatagaagaactaccaaaaggaaaacagcaaataatagttacagaaataccttatcaagtaaataaggctaaactggttgaaagaatagcagagttagttaaagaaaagagaatagaaggtatatcagacctaagagacgaaagtaatagaaatggtatgagaattgttatagaattaaagagggatgctaatgctaatatagtattaaataatttgtataaacattctcaaatggaagatacttttagtataataatgcttgcacttgtagatggtcagccaagagttttaaatcttaaacaaatattatatcattatattaaacatcaagaagatgttgttacaagaagaactaaatttgaactaaataaagctgaagcaagagcacatattttagaaggattaaagattgctttagataatatagatgctgttataagcttgataagagcttcaaagactgggcaagaagctaagataggtttaatagaaaaattcaaattaactgaaatccaagcacaagctatattagatatgagacttcaaagacttacaggtttagaaagagataagatagaagctgaatatgaagatttaatcaagaagataaatagattaaaagaaattttagctgatgaaagattacttttaaatgtaataaagaatgaaattacaataataaaagaaaattactctgatgagagaagaacagaaataagacatgctgaaggcgaaatagatatgagagatcttataagtgatgaagaaatagcaataactcttactcactttggatatataaaaaggcttccatctgatacttataagagtcaaaaaaggggtggaagaggtatttcagcacttacaactagagaagaagattttgtaaggcacttggtaactacaactactcatagtagactattattctttacaaataaaggtagagtatttaaattaaatgcatatgaaataccagaaggtaagagacaggctaaaggtactgctatagtgaatttacttcaattgtcagcagatgagaaaattgctactctaatacctattgatggtaatgatgaaaatgaatatttattacttgcaacgaaaaaaggtattgttaaaaagactaagagagaagagttcaaaaatataaataaatctggtcttattgctataggtttaagagatgatgatgagcttattggagtagaacttacagatggaaaacaagaagtacttttagtaactaaagaaggtatgtctataagatttgatgaaaatgatataagatatatgggtagaacagcaatgggtgtaaaaggtataactttaagtaaagaagattttgttgtgtctatgaacctttgcagtaaaggtacagatgtgttagttgtaagtaagaatggttttggaaagagaacaaatatagaagagtatagaagtcaaataagagctggtaaaggaattaaaacttataatatatctgaaaaaactggtacaattgtaggtgcagatatggtcaacgaagatgatgagataatgattataaattctgatggagttcttattagaataagagtcaatgaaatatcactgtttggaagagttacaagtggtgttaaattaatgaagacgaatgatgaagtcaatgtagtttcgattgccaaaataaatattgaagaagaataggataaatatcctattctttttgtataatgtagttagataaaaatttaaaattgaaaggagtaattgttatgtgcaataaaagaagttgtaaaaaaggtggatttttattattaggagctattttagggtttatatttggtatgttttttgcacctaaaaaaggttctgaactaagaaaagaaacaaaagagaagtttaatgatgtcaaagaaaatccaaaagaagttctacatgaaacatttaatgatgttaaagagagaataataaatttagtggacgatgataataatgaagaagatataaagatttcagaagaagatatagtaataagtaaaagctttgatgatgagggagatgttaactaatgaatgcatgggggtggcaaattggagcagtgttagtaggaagctctgctcttatagtagcaatttatttagctaaaactctaaacagcataaataaggttgttgaaaaggcatataagattgtagattataatgaaagacatatacaagatattgttgaaaatgcatcatcaatatcaaagggaatagatgatatagtttatgtaattaataaaatattgagtataggaaatatatttaaaattattaaaaggaaataggaggtttttacatgtctatgaatattgattcaaatttagattcacaaaataaattttggaatgtttgtcttgatggagaacttgatgtttctacagcagataaactaaaggaacatttacatgctttaatagaaaaaaatatgttagatgtaaagattaatcttaaagatttagattatatagactcaacaggcttaggagctatgataggtgtattaaaaaaattaaaaataaatgaaaaagagatatacatagtaaatcctaagagtaacgtaaaaaagatttttactataacaggtctagataaaatatttaaagtggagggataaactttggcttgtgagactataaagatggaaattactacaaatccagattatgttagtataataagattaacagcatctggaattgccaataagatgggttttccaatagatgatatagaagatataaaggtagcagtatctgaagcatgtacaaatgcaataaaacacagtaaagatgatgtgtttaatatagtatttaatattttagataatgcaattaatatagaaattcaagataatggaaaaggatatgatgttagctcaataagtacaccagatttagagaatccaaaagagagtggtcttggattgtttataattaaaactttaatggatgatgtagatattgaatcagaacataatcaagggacaaaaataaaaatgactaaatatttaggagttgatatttaatgaaaaatgtagctaatgctacacattacctaaatatggatacaaaagagctatttaatttatataataaaaataaaaatgtagacattagaaatattcttattgaaagacatctgtatttagcaagattgttagctaagaagtatataaacaaaggtgttgattttgaagatatatatcaagttgcttcattggcattaatttatgctattgatagatatgatgttgagaaaggatttgagttctccagctttgcgacaccaactatagtaggagaaataaaaaagtattttagagataaggtatggacacttagagtcccaagaagaatacaggaattaagcaaaaagataagtgatgcgaagattaaattagaacaagaaaataagaagcatccaaaggtaaaagatatagctgattatataggcgttagtgaagaagatgttttagaggctatggaggcttcttatggatatcaaccaatgtctttggattcatcaagtaatgatgattcagaggataaagatataactcttattgataagattggaaaagaagaaggtaactttggaagtatagagtatgaagattttattaataagtttattgaaactttaaatgaattagaagttaaaatttttaaagatagatttttctttgataaaacacaatctagtatagctaaagaactagggatatcacagatgactgtttctagactagagaaaaaggtagtagagaagctgaaaaaagaatatgaaaaaaatttataaaaaaatataaaaaaagtattgacctactgttttaaagatggtatagtattacttgtccttgaaaaaaggaacaagaaataaacacgaacattgaaaattaaacagtaggttaatttatattaagaaacaaaccataaagccagatattttgataacaatagtatctgagcctgataaacttttatttgagagtttgatcctggctcaggatgaacgctggcggcgtgcctaacacatgcaagttgagcgatttacttcggtaaagagcggcggacgggtgagtaacgcgtgggtaacctaccctgtacacacggataacataccgaaaggtatgctaatacgggataatatatttgagaggcatctcttaaatatcaaaggtgagccagtacaggatggacccgcgtctgattagctagttggtaaggtaacggcttaccaaggcgacgatcagtagccgacctgagagggtgatcggccacattggaactgagacacggtccaaactcctacgggaggcagcagtggggaatattgcacaatgggcgaaagcctgatgcagcaacgccgcgtgagtgatgaaggccttcgggtcgtaaaactctgtcctcaaggaagataatgacggtacttgaggaggaagccccggctaactacgtgccagcagccgcggtaatacgtagggggctagcgttatccggatttactgggcgtaaagggtgcgtaggcggtctttcaagtcaggagtgaaaggctacggctcaaccgtagtaagctcttgaaactgggagacttgagtgcaggagaggagagtggaattcctagtgtagcggtgaaatgcgtagatattaggaggaacaccagttgcgaaggcggctctctggactgtaactgacgctgaggcacgaaagcgtggggagcaaacaggattagataccctggtagtccacgctgtaaacgatgagtactaggtgtcgggggttacccccttcggtgccgcagctaacgcattaagtactccgcctgggaagtacgctcgcaagagtgaaactcaaaggaattgacggggacccgcacaagtagcggagcatgtggtttaattcgaagcaacgcgaagaaccttacctaagcttgacatcccaatgacatctccttaatcggagagttcccttcggggacattggtgacaggtggtgcatggttgtcgtcagctcgtgtcgtgagatgttgggttaagtcccgcaacgagcgcaacccttgtctttagttgccatcattaagttgggcactctagagagactgccagggataacctggaggaaggtggggatgacgtcaaatcatcatgccccttatgcttagggctacacacgtgctacaatgggtagtacagagggttgccaagccgtaaggtggagctaatcccttaaagctactctcagttcggattgtaggctgaaactcgcctacatgaagctggagttactagtaatcgcagatcagaatgctgcggtgaatgcgttcccgggtcttgtacacaccgcccgtcacaccacgggagttggagacgcccgaagccgattatctaaccttttggaagaagtcgtcgaaggtggaatcaataactggggtgaagtcgtaacaaggtagccgtatcggaaggtgcggctggatcacctcctttctaaggagaattacctactgtttaattttgagggttcgtttttacgaatactcaaaattagcacttttagcaacagaataaactgaacgcatgtgaagtttgtttgttggcgctgtgcgttagcactttaagcaacggaatttattcgttggcgccgtgctttagcactttgaaaactgcatatatatttagtgatatgacatctaatttgtaatatataaagctgataactttttaaaattatcgaagttgatagcttctaatctatcaaacctttttaactggtcaagttattaagggtgcagggcggatgccttggcactaggagccgatgaaggacgtgataagctgcgataagcttcggggagttgcacgtaaactttgatccgaagatttccgaatgaggaaactcacttagagtaatgtctaagtatcattaagtgaatacatagcttaatgaggggaactcagggaactgaaacatctaagtacctgaaggaagagaaagaaattcgattccgtaagtagcggcgagcgaacgcggattagcccaaaccaataaagttttctttattggggttgcggacatatcataacgaagaggtatcgtaattgaagaggtttggaaagacccaccacagaaggtaatagtcctgtatgttaaacgagaagacttcagatatgatccagagtaccacgggacacgtgaaaccctgtgggaagcaggagggaccaccctccaaggctaaatactacctagtgaccgatagcgtatagtaccgtgagggaaaggtgaaaagaaccccgggaggggagtgaaatagaacctgaaaccctgcacttacaagctgtggaagcacatttcttgtgtgaccgcgtactttttgtagaacgggccaacgagttacgttaagtagcaaggttaagcacttaaggtgcggagccgtagcgaaagcgagttttaactgagcgttcagttacttgacgtagacccgaaaccgggcgacctacccatgagcaggatgaagcgaaagtaaaatttcgtggaggtccgaacccacgagcgttgaaaagctcggggatgacttgtgggtagcggtgaaattccaatcgagcccggagatagctggttctccccgaaatagctttagggctagcctcaaggtgagagatacggaggtagagcactgaatgtcctagggggtattgcacctaccgaagactatcaaactccgaatgccgtcatcttatacttgggagtcagactgtgggtgataagattcatagtcgaaagggcaacagcccagatcgtcagctaaggtccctaaatgtaagttaagtggtaaaggatgtgggattgcacagacaaccaggatgttggcttagaagcagccactcattcaaagagtgcgtaatagctcactggtcgagtgatcctgcgccgaagatttccggggctaaaacttactaccgaagctacggcatcagtaatgatgggtaggggagcttcccatacgggttgaagcatgaccgtaaggacatgtggacagtatgggagtgagaatgttggcatgagtagcgagatgtgggtgagaatcccacaggccgtaaacccaaggtttccaggggaaggttcgtccgccctgggttagtcgggacctaagctgaggccgaaaggcgtaggtgatggacaacaggttgatattcctgtactaccgataaccgtttgagagaagggatgacacagtaggataagctaagcacactgttggttatgtgtgcccaagcattgaggcagtcaaagtaggcaaatccgctttgataatgctgggatgtgatggggagcgaaatttagtagcgaagtagctgatttcacactgtcaagaaaagtctctatcgaggttaaaggtacccgtaccgcaaaccgacacaggtgggtgaggagagtatcctaaggccagcgagagaactgttgttaaggaactcggcaaaatgaccccgtaacttagggataaggggtgccaccatcaggtggccgcagagaataggcccaagcgactgtttaccaaaaacataggtttctgctaagtcgcaagacgatgtataggagctgacgcctgcccggtgctggaaggttaaggggatctgttagagcaatcgaagcagtgaacttaagccccagtaaacggcggccgtaactataacggtcctaaggtagcgaaattccttgtcgggtaagttccgacccgcacgaaaggcgtaacgatttgggcactgtctcaacaacagactcggtgaaattgtaattccggtgaagatgccggatacctgcgacaggacggaaagaccccatggagctttactgtagcttgacattgggtcttggtactacatgtacaggataggtgggaggctttgaaaccaggacgccagttttggcggagccatccttgggataccacccttgtagtactgggactctaaccataggccatgaatctggtcttgggacactgtcaggtgggcagtttgactggggcggtcgcctcccaaaaggtaacggaggcgctcaaaggttctctcagtacggtcggaaatcgtacgtagagtgtaaaggcaaaagagagcttgattgcaagacatacaggtcgagcaaggatgaaaatcggacttagtgatccggtggttctgcgtggaagggccatcgctcaacggataaaagctaccctggggataacaggcttatctcccccaagagtccacatcgacggggaggtttggcacctcgatgtcggctcatcacatcctggggctgtagtaggtcccaagggttgggctgttcgcccattaaagtggtacgcgagctgggttcagaacgtcgtgagacagttcggtccctatccgtcgcaggcgtaggaaatttgagaagacctgtccttagtacgagaggaccgggatggacgtacctctggtgtaccagttgtcctgccaagggcatggctgggtagctatgtacggaatggataagcgctgaaagcatctaagcgcgaagccaacttcaagataagatttcccaccgcaagggtaagaccccagaaagactatctggttgataggtcgaaggtgtaagtgcagcaatgtatttagcttatcgatactaataggtcgaggacttgaccaatattatttgatgtcattcattaagatatatgtgcagtttttagagtgctaaatctatatttttaaacttgtcaaaacttatggatttttaatagttttataaggcaaaaaatcgaataaaaaaagtattgacacaataagacaaagatgttattataatacttgtcttagaaaaaaagttaaatgaaaatttagacaataatctggttataatagcagagaggatacacctgttcccattccgaacacagaagttaagctctctagcgctgatggtacttggtgggaaaccgcctgggagagtaggacatagccaggtaatgtgccgaagtggcggaactggcagacgcacaggacttaaaatcctgcgggacttacctctcgtaccggttcgattccggtcttcggcaccacaaattattgtgggccattagctcagttggttagagcgcccggctcataaccggtaggtctggggttcgagtccctgatggcccaccacaataatttaaagaactttgaaaattaaacagtaggttaatttataaacaagaaacaaaccataaagccagatattttgataacaatagtatctgagcctgataaacttttatttgagagtttgatcctggctcaggatgaacgctggcggcgtgcctaacacatgcaagttgagcgatttacttcggtaaagagcggcggacgggtgagtaacgcgtgggtaacctaccctgtacacacggataacataccgaaaggtatgctaatacgggataatatatttgagaggcatctcttgaatatcaaaggtgagccagtacaggatggacccgcgtctgattagctagttggtaaggtaacggcttaccaaggcgacgatcagtagccgacctgagagggtgatcggccacattggaactgagacacggtccaaactcctacgggaggcagcagtggggaatattgcacaatgggcgaaagcctgatgcagcaacgccgcgtgagtgatgaaggccttcgggtcgtaaaactctgtcctcaaggaagataatgacggtacttgaggaggaagccccggctaactacgtgccagcagccgcggtaatacgtagggggctagcgttatccggatttactgggcgtaaagggtgcgtaggcggtctttcaagtcaggagtgaaaggctacggctcaaccgtagtaagctcttgaaactgggagacttgagtgcaggagaggagagtggaattcctagtgtagcggtgaaatgcgtagatattaggaggaacaccagttgcgaaggcggctctctggactgtaactgacgctgaggcacgaaagcgtggggagcaaacaggattagataccctggtagtccacgctgtaaacgatgagtactaggtgtcgggggttacccccttcggtgccgcagctaacgcattaagtactccgcctgggaagtacgctcgcaagagtgaaactcaaaggaattgacggggacccgcacaagtagcggagcatgtggtttaattcgaagcaacgcgaagaaccttacctaagcttgacatcccaatgacatctccttaatcggagagttcccttcggggacattggtgacaggtggtgcatggttgtcgtcagctcgtgtcgtgagatgttgggttaagtcccgcaacgagcgcaacccttgtctttagttgccatcattaagttgggcactctagagagactgccagggataacctggaggaaggtggggatgacgtcaaatcatcatgccccttatgcttagggctacacacgtgctacaatgggtagtacagagggttgccaagccgtaaggtggagctaatcccttaaagctactctcagttcggattgtaggctgaaactcgcctacatgaagctggagttactagtaatcgcagatcagaatgctgcggtgaatgcgttcccgggtcttgtacacaccgcccgtcacaccacgggagttggagacgcccgaagccgattatctaaccttttggaagaagtcgtcgaaggtggaatcaataactggggtgaagtcgtaacaaggtagccgtatcggaaggtgcggctggatcacctcctttctaaggagaattgcctactgtttaattttgaaagttctttacgaactttatatatgggggtgtagctcagttgggagagcacttgccttgcaagcaaggggtcaggagttcgactctcctcatctccaccatttaagagtatattacttaaatctttgatttacttagtagcctcttacaatgcacttatagcttaaatttatacaagctttgtgcgttagcactttaagcaacgggatttattcgttggcgacgtgttttagcactttgaaaactgcatatatatttagtgatatgacatctaatttgtaatatataaagctgataactttttaaaattatcgaagttgatagcttctaatctatcaaacctttttaactggtcaagttattaagggtgcagggtggatgccttggcactaggagccgatgaaggacgtgataagctgcgataagcttcggggagttgcacgtaaactttgatccgaagatttccgaatgaggaaactcacttagagtaatgtctaagtatcattaagtgaatacatagcttaatgaggggaactcagggaactgaaacatctaagtacctgaaggaagagaaagaaattcgattccgtaagtagcggcgagcgaacgcggattagcccaaaccaataaagttttctttattggggttgcggacatatcataacgaagaggtatcgtaattgaagaggtttggaaagacccaccacagaaggtaatagtcctgtatgttaaacgagaagacttcagatatgatccagagtaccacgggacacgtgaaaccctgtgggaagcaggagggaccaccctccaaggctaaatactacctagtgaccgatagcgtatagtaccgtgagggaaaggtgaaaagaaccccgggaggggagtgaaatagaacctgaaaccctgcacttacaagctgtggaagcacatttcttgtgtgaccgcgtactttttgtagaacgggccaacgagttacgttaagtagcaaggttaagcacttaaggtgcggagccgtagcgaaagcgagttttaactgagcgttcagttacttgacgtagacccgaaaccgggcgacctacccatgagcaggatgaagcgaaagtaaaatttcgtggaggtccgaacccacgagcgttgaaaagctcggggatgacttgtgggtagcggtgaaattccaatcgagcccggagatagctggttctccccgaaatagctttagggctagcctcaaggtgagagatacggaggtagagcactgaatgtcctagggggtattgcacctaccgaagactatcaaactccgaatgccgtcatcttatacttgggagtcagactgtgggtgataagattcatagtcgaaagggcaacagcccagatcgtcagctaaggtccctaaatgtaagttaagtggtaaaggatgtgggattgcacagacaaccaggatgttggcttagaagcagccactcattcaaagagtgcgtaatagctcactggtcgagtgatcctgcgccgaagatttccggggctaaaacttactaccgaagctacggcatcagtaatgatgggtaggggagcttcccatacgggttgaagcatgaccgtaaggacatgtggacagtatgggagtgagaatgttggcatgagtagcgagatgtgggtgagaatcccacaggccgtaaacccaaggtttccaggggaaggttcgtccgccctgggttagtcgggacctaagctgaggccgaaaggcgtaggtgatggacaacaggttgatattcctgtactaccgataaccgtttgagagaagggatgacacagtaggataagctaagcacactgttggttatgtgtgcccaagcattgaggcagtcaaagtaggcaaatccgctttgataatgctgggatgtgatggggagcgaaatttagtagcgaagtagctgatttcacactgtcaagaaaagtctctatcgaggttaaaggtacccgtaccgcaaaccgacacaggtgggtgaggagagtatcctaaggccagcgagagaactgttgttaaggaactcggcaaaatgaccccgtaacttagggataaggggtgccaccatcaggtggccgcagagaataggcccaagcgactgtttaccaaaaacataggtttctgctaagtcgcaagacgatgtataggagctgacgcctgcccggtgctggaaggttaaggggatctgttagagcaatcgaagcagtgaacttaagccccagtaaacggcggccgtaactataacggtcctaaggtagcgaaattccttgtcgggtaagttccgacccgcacgaaaggcgtaacgatttgggcactgtctcaacaacagactcggtgaaattgtaattccggtgaagatgccggatacctgcgacaggacggaaagaccccatggagctttactgtagcttgacattgggtcttggtactacatgtacaggataggtgggaggctttgaaaccaggacgccagttttggcggagccatccttgggataccacccttgtagtactgggactctaaccataggccatgaatctggtcttgggacactgtcaggtgggcagtttgactggggcggtcgcctcccaaaaggtaacggaggcgctcaaaggttctctcagtacggtcggaaatcgtacgtagagtgtaaaggcaaaagagagcttgattgcaagacatacaggtcgagcaaggatgaaaatcggacttagtgatccggtggttctgcgtggaagggccatcgctcaacggataaaagctaccctggggataacaggcttatctcccccaagagtccacatcgacggggaggtttggcacctcgatgtcggctcatcacatcctggggctgtagtaggtcccaagggttgggctgttcgcccattaaagtggtacgcgagctgggttcagaacgtcgtgagacagttcggtccctatccgtcgcaggcgtaggaaatttgagaagacctgtccttagtacgagaggaccgggatggacgtacctctggtgtaccagttgttctgccaagggcatggctgggtagctatgtacggaatggataagcgctgaaagcatctaagcgcgaagccaacttcaagataagatttcccaccgcaagggtaagaccccagaaagactatctggttgataggtcgaaggtgtaagtgcagcaatgtatttagcttatcgatactaataggtcgaggacttgaccaaattatttgatgtccattcaataaaatatatatgtagtttttagagtgttaactctaaagaaactagtattactagattctaaaaacttaatagaaatattaagcataaagattatgtggttacaatagcagagaggatacacctgttcccattccgaacacagaagttaagctctctagcgctgatggtacttggtgggaaactgcctgggagagtaggacgtagccacgtaatcttttttatttgcaataaagtttaatattaaatagaatataaaatcaatattgatttataataagataaaatatagaattatatagtataggtaaagtttttgatttagaaagaaggtgtaatatgaattctgatgaaagaagaagcaaattaatagatattttaaaagaatctaagtgccctgtaaaaggtggaatgctagctgagatattaaatgtaagtaggcaagtaatagtacaagatatagcccttataagagctagaggatttgaaataatagctacacctcaaggatatataatatataatcaaccatattttacaaagcaaataaaatgtaagaatcacaggaattctaaagaaatttatgatgaattaaagattattgtagatttaggtggaattgttaaggatgtcatcgtaaatcatccaacatatggtcagataactgcagagcttaatattcactctaaaatggatatagataattttatgaagaaggttgagacaaatgaatttaaacagttatcagttctaactgaatgtagtcatattcatacaattgagacattaaaagaagagactatagaagttataacaaaagaattagaggacagaggaatattatcataaggaggagttaaatgaattttttatcattagctaaggctgcttcaacaaatagtaatataactaaaagaactttagaaaatatgcttaataactttagtgataatataccaaatattatatatgcaataatcgtatttgtaataggtatctatatatctaagatagtaagaaagatggtttcaaggtttttaatcaaatatggaatgagtaaaggtgtaaataatttcattgtatatggaatatacatatctatgttatctattatatcattgataagcttgggtgttatagggatacaaactacatcagttgtagctgtattaggagctgctggatttagtataggtttagcatttaaagaaatattatcaaatttaggttcaggtatgattattttattttttaagccatttaatataggtgattatattcaaggctcaggtgtagaaggcacagtttctgatatacaaatatttagtactgttcttaaaaccccagataataaaaccataattataccaaactttcaattgacaagtaacaatataattaattacacacatcaaaataaaagaaggatagatttttcatataatatttcatatgatagtgatattgatgtagttaagtccatattgaatgaaatttttataaatgaaaaaaggatattggatgacccaaaaccaattataggtttaaactctataggaaacaacactatgcaaatagttgctagaccatgggttaaaactgatgattactgggatgtttactttgatgtaatggaaaaagtcaaaaataaatttgacgaaaataatataaaagttccatttgttccttcctcgttattatttaataatatgagcaattcaaatacaatggataaaagatagaatttcaattaagtaaaaaagtgaatttaatataaaaaattaaagaaaattctaaaaaaatttgaataatagtattgaaagatgttaatatatataatataatgattatcaaataaaacaattagttaaaaagcggtgaaggaaaatagtaaaaaacagattgtattcagagaatgagtggatggtgagaactcattacaatggtttttgaatctactctagagcttctagttaaagctagacggtttacctacgttataggtctgagaggattatacgttttagtataatcaattagggtggcaacgcggataaaagattttcgtcccttttatagggtaaacggaggtctttttttatttttcaaatttgtttaaattaaaagtttacagctagaatacttgtaaattaattggaattataatttatattatcaaaattattaggaggaattaatatgttagatattaaaagaataagagaaaatctagatgatatcaaaaaagctatggaaagaagaggtgaaagagaatttgaccttgatgctgtagtggaactagataataaaagaagagaaatacttcaagaagttgaagttatgaaaaatgagttaaatgtaaattctaaaaaaatacctcaattaataaaagaaggaaaagatgtaacagaagaaaagacaagattgaaagagttatcagataagataaaaggtattgatgagaaagtaaaagaagtagaagcaaaaatggaatatacattaatgagaataccaaatgttcctcatccagaggtaccacaaggtgaaacagatgaagacaatgttcaaataagaacttggggagaacctactaaatttgattttgagtataaagcgcattgggatatagggacaggtctaggtattttagattttgaaagagcagggaaaataactgggtcaaggtttactttatataggggattaggagctagattagaaagatctttaatgaatttctttttaaatactcatacagctaagcatggctatacagaagtcttacctccatttatggccaatagaaatagttttatagggactggtcaacttcctaaatttgaagaagatatgtttaaaatagaaggattagagtatttcttaataccaacagctgaagttcctgttactaatatacatgctaatgaaatattagatgttgcagagcttccaattaaatactgtgcatatactccttgttttagatctgaagcaggttcagcaggaagagatacaagaggtttagttagacaacatcaatttaataaagttgaattagttaaatttgttaaaccagaagattcttataatgaattagaatcattaactcatgatgctgaaactatgttacaaatgttaggtcttccatatagagttgtaaaaatatgtacaggagatttgggatttacagctgcatttaaatatgatttagaagtttggatgccaagttacaatagatatgtagaaatatcttcttgttcaaattttgaagatttccaagcaagaagagcaggaataagatttaaaagagataaaaaatcaaaagcagaatatgttcatacattaaatggttctggattagcgataggaagatgtttggctgctatattagaaaattatcagcaggcagatggttctgtagtagttccagaagaattaagaccttatatgggtgttgatgttataaaataaatttatattaattgtatatgtagagtatgctttgatgaagagaatatattatgagtaaacaataaataaaaaaactatgaaattattataaatattaatttcatagtttttttatgttaatttacacagcagaattttcatcataaaacactaaatatttttataaaacactcttgtatgaatatctaaaaattattttagaactaattaaaaaaaatatcgctatatatagtaataattaaataaacaaaataaaattaagttgaattataaaatgaattatgataagataagtttgttataagttttgggaggaattatggaaagttcattttatatgaaagaagcattaaaagaagcatataaagcatataataaaaaagaaacaccaataggtgctattatagttaaagataatcaaataatagctagagctcataaccttacagaaacgttaaaagactctacggcacatgcagaaattttagcgataaaacaagcatcagaaaaattaggtggttggaggttgactgattgtgatttatatgttacaatggaaccttgcataatgtgtagtggcgcaatagttaattctagaataaaaaagcttataatagggacaagacatgtaaaaaattcatatatagaaaaacagcatgagtttaaattagattattttaataataataatgtaaaagtagcttttgatgttttgcaagaagaatgctcgatcatattgcaagaattttttaaggcattgagaaaaagagattaaggagagatggtcgagtggtcgaaggcgctcgcctggaaagcgagtatatgggtaaaactgtatcgtgggttcaaatcccactctctccgccagaaacaatgaaagtaattaaatatggttgtaattttgctgtactagatggggaggtagcggtgccctgtaacctgcaatccgctatagcaggattgaattccatctaaaggcttattttctgtagggccgccctaaataagtggtgttgatgcttaggtcctgcgcaatgaaagctcatgaaccccgtcagatccggaaggaagcagcggtaagtgatcacttttgtgtgccgtgggggtgcctaagttgagctaactgttttggtaacgcctatggaattaagtcgatagatggtgtacagcatttaatatataaaagactaatcccttagataatgagggatttttttattaattttgctaaagagaggtaaaaagatgcataaagcattatatagagcatatagaccacaaaaatttgaagatgttattggtcaagatcatattattaagactttaaaaaatcaaatatatagtgataatataggacatgcttatttgttttgtggaacaagaggtactggtaaaacatctactgcaaagattttttcaagagcagtaaactgtttgaataaaataaatgaagaaccgtgtaatgagtgtgagatatgtgaatctgtattaaaagataatacaatggatgttgtagaaatagatgcagcttcaaataatagtgtagatgatataagagagcttagagaaagtgtgaaatattctccagccaatgctaaatataaagtatatataatagatgaagttcatatgttgtctcaaggagcttttaatgcattattaaagaccttagaggaacctccatcatatgtaatttttatattagcaactacagagcctcacaaaatacctgcaaccattttatcaagatgccaaagatacgattttaaaagagttacagttaaagatatgacccttagaatgaaaaagatttgtgaagatgaaggaattgatatagatgataaagctcttaatttaatagctagaaattctcaaggagctcttagagatgcacttagtatattagaccaatgtatgtcttttggagaaagtaagatagattataaagatgttgttgaattaatgggaagcgtaaatatagaacaattatttgaattgtctcaatgtattgtagagcaggacactaaaaagtctcttgagatattaaatgaatttgtcttatggggcaaagatataagaaatcttataaatgacttaattgatcattttagaaatttaatggtatgtaaggtttcatcagaattggatgaaataatttcattaccagaagaaactatagaacaacttaaaattcagtctaaaaatatagatataaatgatttaataaggattttaaatatattatcaataactcaggatgatataaagtcatcttcaaatccaagggttttagtggaaataaccataatgaaaattgctcaaccaatgtttgatgaaagtaaagaagctcttataaaaagagttgagaacttagaaaaaatgattgaactggggaactttaagtctgaaaaaattgggaataataaagaaaaagagtatgaggtcgatagagaaatagatgtaaaacaagaaaatgtagtttatgaagatgtaaaaaatgaggacgttatacttatagagtcatcttggaagaatatacttaaacaaattaaaaaagataaaaaaatgccaatatacgcactcttaagtgaagtaaaaagttttaatgtatattctaatatgttgtatgttatatttgatgataaatttgattttgcaaaaactagactgagctctcaagatacaataaattatttagaaaaaacaataagagatgttttaaatagaagttttaatgtaaaaatagtactgacatcagaagttaaagatataaatcttgaagttaaagagaaaaaggacattggtgaggagatattaaagaacatagtgagtgaagagatattagaaataaaatatagtattgatgaaaatgagagtaaataataaaatactattatgatataataataaaatgaaaataagtttaggaggaatagtgtttatggctaaaaaaggttttggaggcggaatgatgcctggtggtggaaatatgaacaacttgttaaagcaggctcaaaaaatgcaagaaaatatgcaaaaagctcaacaagagttagaaagtaaagaagtagaagcttcagttggtggaggagcagttactgtaaaagttaatggtaaaaaagaagttatagatataactatcaagccagaagtagttgatccagatgatatagaaatgctacaagatttagttttaagtgcagtaaatcaagcattgagaaatattgatgatatacaagcaagtcaaatgagtaaggtaactggaggtatgaatatacctgggttattctagtaggtggtatttatgcaagtttatacaggtcccataacgagacttatagaggaattttcaaagcttcctggagtaggaagaaagactgctcaaagattggcttttcatattattaatatgaatactaatgatgtggaagctttatctaaagcgattatagatgcaaaaagagaaataagatattgctcaatttgttgtaatataacagatacagacccatgtagcatgtgttcaaataaaagtagagattcaagtgttatatgtgttgtggaagatccaagagatgtagcagctatggagagaacgagagagtttaaaggacagtatcatgtattaaatggagtaatttctccaatggatggaattggaccagatatgttaaaaataaaggaacttatccaaagacttggcaatcaggaagtcaaagaaataataatggcaacaaatcctactattgaaggtgaagcgacagccatgtatattgctaggttagtaaaaccaatgggaatcaaagtcactcggatagctcatggtcttcctgttggaggcgatttagagtatgcagatgaggtcacaatatcaaaagcactagaaggcagaagagaaatataaaaatcgaggttaatacctcgatttttgtagttttttgagttaaattcaaattaattttgatttagatttattgaataaatttcttctgtattgtataatttgttgtataaatcatttaaaaattttgataggggtgcaacatgaaaccaattatgaacttagaagaacataatgcaatgaaagaaaaaagagttaaaaaaatgaaatcaaaagataaacctaaatatgatgattttgaggatataagtttttctaataagaaaaaaactaaaaaaaatgtacgaaataaaaatgctgaatttagaaataattataaaaattatcagtatgattatgaagaagacttttatgaaccaatttaatattaaataattagaaaataaaaaatccctaatagataatatatatactatagggattttatttattttatcaaccagaaattatatttaaaattaaattagctatattttgggctgaatttgactttcttattgatttaacatttctttttagcatttctaatctgctagggtcatctattagaacttttagtaatattgacaagttatatttttttgtagttctaagtgctgcaccacaattagataagaaatcaagattctcttcttcctgacctggtatataataaggaactatcataggtacatcttttaaaagagcctcagttgtagtaagtccaccaggtttgcttactaatacatctatagaagctaaaatatcattcatcttatcagtgtatccaagaacacatacatttttatcatgataacgagacataagttttttttcgattttttcttttaggctttcattcttaccagtaattacaagtatttgaaaatctctatcagtatccagtaattcatcaagtgtctcttttatatttccagccccaaagctaccccccataagtaaaacagttaatttatcaggagataaattcaactcagaaagaacaatatctttatctctgtgagagagaaaagatttttcaacagggattccaaatgttctaattttactcggtccaactccatcaaacaccaataattcttttacatattcatgaccaacaatatagtaatcaatttcattttgtatccatgtagaatgagtagtataatcggttaatacagaaataagcggaggaacattaatggtatttgtataatgtttataaaaatgctctgtgtaagcatttgattcattattatgtaaattaaagttttttttcaatgtgcttagagcaatcattggaaaaggatgtgttcctataatcaagtctggtttttcgcttctaataagctttttaaattttttagccatgaatgttattagtagattatctttaaattcattttttgacaaaagatttgtttcagataatctatatacacttccataggctttgggagtatatatagcagatttttcgtatcctcttgaaattattttatccattgtattattaactaatttcaaactatctattatttcacattcaattggctctccatcaagtgttttggaagtaagttcttctttaatagctagagcagccctattatgcccaccaccagtggaagcagacattattaatacttttttgctcataataaaatcctcctaaaatgtagcatagtatttatattgtattatattttgatatataaaaactgtctttgtgaataaggttattgataaattatttttaatattaatctaatacaagattgcaaaaattacaagtgaaagaaatgtaaattaattttatcaaatatgttatattaaaaatattcttgtaaataaaaaatttaaatatagaataaaaaggaaaatagagcatagaatatatattagttttatgaaataaataggtttacttagcattaagttttaaaaattaaatataaagaatacatgataaataaaaaatttaaaaaaagtaaaaaattatattgactagaatagataaagatgatatagtattacttgtccttgaaaaaaggaaaaagaaataaacacgaacattgaaaattaaacagtaggttaatttatattaagaaacaaaccataaagccagatattttgataacaatagtatctgagtctgataaacttttatttgagagtttgatcctggctcaggatgaacgctggcggcgtgcctaacacatgcaagttgagcgatttacttcggtaaagagcggcggacgggtgagtaacgcgtgggtaacctaccctgtacacacggataacataccgaaaggtatgctaatacgggataatatatttgagaggcatctcttgaatatcaaaggtgagccagtacaggatggacccgcgtctgattagctagttggtaaggtaacggcttaccaaggcgacgatcagtagccgacctgagagggtgatcggccacattggaactgagacacggtccaaactcctacgggaggcagcagtggggaatattgcacaatgggcgaaagcctgatgcagcaacgccgcgtgagtgatgaaggccttcgggtcgtaaaactctgtcctcaaggaagataatgacggtacttgaggaggaagccccggctaactacgtgccagcagccgcggtaatacgtagggggctagcgttatccggatttactgggcgtaaagggtgcgtaggcggtctttcaagtcaggagtgaaaggctacggctcaaccgtagtaagctcttgaaactgggagacttgagtgcaggagaggagagtggaattcctagtgtagcggtgaaatgcgtagatattaggaggaacaccagttgcgaaggcggctctctggactgtaactgacgctgaggcacgaaagcgtggggagcaaacaggattagataccctggtagtccacgctgtaaacgatgagtactaggtgtcgggggttacccccttcggtgccgcagctaacgcattaagtactccgcctgggaagtacgctcgcaagagtgaaactcaaaggaattgacggggacccgcacaagtagcggagcatgtggtttaattcgaagcaacgcgaagaaccttacctaagcttgacatcccaatgacatctccttaatcggagagttcccttcggggacattggtgacaggtggtgcatggttgtcgtcagctcgtgtcgtgagatgttgggttaagtcccgcaacgagcgcaacccttgtctttagttgccatcattaagttgggcactctagagagactgccagggataacctggaggaaggtggggatgacgtcaaatcatcatgccccttatgcttagggctacacacgtgctacaatgggtagtacagagggttgccaagccgtaaggtggagctaatcccttaaagctactctcagttcggattgtaggctgaaactcgcctacatgaagctggagttactagtaatcgcagatcagaatgctgcggtgaatgcgttcccgggtcttgtacacaccgcccgtcacaccacgggagttggagacgcccgaagccgattatctaaccttttggaagaagtcgtcgaaggtggaatcaataactggggtgaagtcgtaacaaggtagccgtatcggaaggtgcggctggatcacctcctttctaaggagaattacctactgtttaattttgagggttcgtttttacgaatactcaaaattagcacttttagcaacagaataaactgaacgcatgtgaagtttgtttgttggcgctgtgcgttagcactttaagcaacggaatttattcgttggcgccgtgctttagcactttgaaaactgcatatatatttagtgatatgacatctaatttgtaatatataaagctgataactttttaaaattatcgaagttgatagcttctaatctatcaaacctttttaactggtcaagttattaagggtgcagggcggatgccttggcactaggagccgatgaaggacgtgataagctgcgataagcttcggggagttgcacgtaaactttgatccgaagatttccgaatgaggaaactcacttagagtaatgtctaagtatcattaagtgaatacatagcttaatgaggggaactcagggaactgaaacatctaagtacctgaaggaagagaaagaaattcgattccgtaagtagcggcgagcgaacgcggattagcccaaaccaataaagttttctttattggggttgcggacatatcataacgaagaggtatcgtaattgaagaggtttggaaagacccaccacagaaggtaatagtcctgtatgttaaacgagaagacttcagatatgatccagagtaccacgggacacgtgaaaccctgtgggaagcaggagggaccaccctccaaggctaaatactacctagtgaccgatagcgtatagtaccgtgagggaaaggtgaaaagaaccccgggaggggagtgaaatagaacctgaaaccctgcacttacaagctgtggaagcacatttcttgtgtgaccgcgtactttttgtagaacgggccaacgagttacgttaagtagcaaggttaagcacttaaggtgcggagccgtagcgaaagcgagttttaactgagcgttcagttacttgacgtagacccgaaaccgggcgacctacccatgagcaggatgaagcgaaagtaaaatttcgtggaggtccgaacccacgagcgttgaaaagctcggggatgacttgtgggtagcggtgaaattccaatcgagcccggagatagctggttctccccgaaatagctttagggctagcctcaaggtgagagatacggaggtagagcactgaatgtcctagggggtattgcacctaccgaagactatcaaactccgaatgccgtcatcttatacttgggagtcagactgtgggtgataagattcatagtcgaaagggcaacagcccagatcgtcagctaaggtccctaaatgtaagttaagtggtaaaggatgtgggattgcacagacaaccaggatgttggcttagaagcagccactcattcaaagagtgcgtaatagctcactggtcgagtgatcctgcgccgaagatttccggggctaaaacttactaccgaagctacggcatcagtaatgatgggtaggggagcttcccatacgggttgaagcatgaccgtaaggacatgtggacagtatgggagtgagaatgttggcatgagtagcgagatgtgggtgagaatcccacaggccgtaaacccaaggtttccaggggaaggttcgtccgccctgggttagtcgggacctaagctgaggccgaaaggcgtaggtgatggacaacaggttgatattcctgtactaccgataaccgtttgagagaagggatgacacagtaggataagctaagcacactgttggttatgtgtgcccaagcattgaggcagtcaaagtaggcaaatccgctttgataatgctgggatgtgatggggagcgaaatttagtagcgaagtagctgatttcacactgtcaagaaaagtctctatcgaggttaaaggtacccgtaccgcaaaccgacacaggtgggtgaggagagtatcctaaggccagcgagagaactgttgttaaggaactcggcaaaatgaccccgtaacttagggataaggggtgccaccatcaggtggccgcagagaataggcccaagcgactgtttaccaaaaacataggtttctgctaagtcgcaagacgatgtataggagctgacgcctgcccggtgctggaaggttaaggggatctgttagagcaatcgaagcagtgaacttaagccccagtaaacggcggccgtaactataacggtcctaaggtagcgaaattccttgtcgggtaagttccgacccgcacgaaaggcgtaacgatttgggcactgtctcaacaacagactcggtgaaattgtaattccggtgaagatgccggatacctgcgacaggacggaaagaccccatggagctttactgtagcttgacattgggtcttggtactacatgtacaggataggtgggaggctttgaaaccaggacgccagttttggcggagccatccttgggataccacccttgtagtactgggactctaaccataggccatgaatctggtcttgggacactgtcaggtgggcagtttgactggggcggtcgcctcccaaaaggtaacggaggcgctcaaaggttctctcagtacggtcggaaatcgtacgtagagtgtaaaggcaaaagagagcttgattgcaagacatacaggtcgagcaaggatgaaaatcggacttagtgatccggtggttctgcgtggaagggccatcgctcaacggataaaagctaccctggggataacaggcttatctcccccaagagtccacatcgacggggaggtttggcacctcgatgtcggctcatcacatcctggggctgtagtaggtcccaagggttgggctgttcgcccattaaagtggtacgcgagctgggttcagaacgtcgtgagacagttcggtccctatccgtcgcaggcgtaggaaatttgagaagacctgtccttagtacgagaggaccgggatggacgtacctctggtgtaccagttgttctgccaagggcatggctgggtagctatgtacggaatggataagcgctgaaagcatctaagcgcgaagccaacttcaagataagatttcccaccgcaagggtaagaccccagaaagactatctggttgataggtcgaaggtgtaagtgcagcaatgtatttagcttatcgatactaataggtcgaggacttgaccaatattatttgatgttattcattaagatatatgtgcagtttttagagtgttaactctatgtaaagtactaacttcaattgatgaagtatatatcgtaaaaacaattactatttagtacttcaaaactattgacatttaaaaataaagatgttaatataatacttgtcttataaataggcaatatgtggttataatagcaaagaggatacacctgttcccattccgaacacagaagttaagctctttagcgctgatggtacttggtgggaaactgcctgggagagtaggacgtagccacgtgaatattccaaggtagctcaatggtggagcaaccggctgttaaccggtaggctgtgggttcgagccccacccttggagccaaaaaaagccgaagtggcggaactggcagacgcacaggacttaaaatcctgcgggacttacctctcgtaccggttcgattccggtcttcggcacttataaaacaatatcgcggagtggagcagttggcagctcgtcgggctcataacccgaaggtcgtaggttcaagtcctgcctccgcaaccattaaaatggctcgttggtcaagaggttaagacaccgccctttcacggcggtaacaggggttcaattcccctacgagtcaccaattaaatatgcgggtgtagctcaatggtagagttctggccttccaagccagctgtgagggttcgatccccttcacccgctccaaaaatgggaccatagctcagctgggagagcacctgccttacaagcagggggtcacaggttcgagccctgttggtcccaccatttgcggcctggtagttcagttggttagaatgccagcctgtcacgctggaggtcgagggttcgaaccccttccaggtcgccaaaataaaatgctggtgtggctcaacggtagagcagctgacttgtaatcagcaggttgtaggttcgattcctatcaccagctccatgtaaaattaatacggaggatttcccgagcggccaaagggggcagactgtaaatctgttgtcatcgacttcggtggttcgaatccaccatcctccaccaaaaaatgcgcggatgtggcggaattggcagacgcactagacttaggatctagcgccattggcgtgggggttcgactcccttcatccgcaccatttttgtttgatatacatatataaattgtgggtgcatagctcagctggatagagcaacgcccttctaaggcgtgtgtccggggttcgaatccctgtgcgctcaccacatatattggggattagccaagtcggtaaggcacatgactttgactcatgtatgcgtaggttcgagtcctgcatccccagccaaatgatgtattactaagctatatttgaactatttttattttaaatatagttaggttcaattttagaataagtttaagtatccgaatgtggagaggtgtccgagtggtttaaggagctggtcttgaaaaccagtgacttcgaaaggggccgtgggttcgaatcccaccctctccgccaaatgcccagatagctcagtcggtagagcaggggactgaaaatccccgtgtcggtggttcgattccgcctctgggcaccaaaatatggcggtatagcttagttggctagagcgttcggttcatacccgaaaggtcataggttcgactcctattaccgctactaaaatttaatgtgggccattagctcagttggttagagcgcccggctcataaccggtaggtctggggttcgagtccctgatggcccaccacattaaattaattaatataaattcgaggtgtagcgcagtttggtagcgcacatggtttgggaccatggggccgggggttcgagtcccttcacctcgaccaatataaggtgggtatagctcagttggttagagcgccagattgtggctctggaggtcgtgagttcgactctcattatccaccccaattcatatggtctattagctcagtcggtagagcacctgacttttaatcagggtgtcccgcgttcgagtcgcggatagatcaccaaaaaggtggcgacatagccaagtggtaaggcagtggactgcaactccttgatccccagttcgaatctgggtgtcgcctccaaaatattccaaggtagctcaacggtggagcaaccggctgttaaccggtaggctgtgggttcgagccccacccttggagccaaaaaagccgaagtggcggaactggcagacgcacaggacttaaaatcctgcgggacttacctctcgtaccggttcgattccggtcttcggcacttataaaacaatatcgcggagtggagcagttggcagctcgtcgggctcataacccgaaggtcgtaggttcaagtcctgcctccgcaaccattaaaatggctcgttggtcaagaggttaagacaccgccctttcacggcggtaacaggggttcaattcccctacgagtcaccaattaaatatgcgggtgtagctcaatggtagagttctggccttccaagccagctgtgagggttcgatccccttcacccgctccaaaaatgggaccatagctcagctgggagagcacctgccttacaagcagggggtcacaggttcgagccctgttggtcccaccatttgcggcctggtagttcagttggttagaatgccagcctgtcacgctggaggtcgagggttcgagccccttccaggtcgccaaaataaaatgctggtgtggctcaacggtagagcagctgacttgtaatcagcaggttgtaggttcgattcctatcaccagctccatgtaaaattaatacggaggatttcccgagcggccaaagggggcagactgtaaatctgttgtcatcgacttcggtggttcgaatccaccatcctccaccaaaaaaatgcgcggatgtggcggaattggcagacgcactagacttaggatctagcgccattggcgtgggggttcgactcccttcatccgcaccatttttatttaatttaataaacgagcgggaatagttcagtggtagagcgcaaccttgccaaggttgaagtcgcgagttcgaatctcgtttcccgctccaaattttatgtttatgttgtaatgtgggtgcatagctcagctggatagagcaacgcccttctaaggcgtgtgtccggggttcgaatccctgtgcgctcaccacatatatattggggattagccaagtcggtaaggcacatgactttgactcatgtatgcgtaggttcgagtcctgcatccccagccaaacagtatggtctattagctcagtcggtagagcacctgacttttaatcagggtgtcccgcgttcgagtcgcggatagatcaccaatggagaggtgtccgagtggtttaaggagctggtcttgaaaaccagtgacttcgaaaggggccgtgggttcgaatcccaccctctccgccaaatgcccagatagctcagtcggtagagcaggggactgaaaatccccgtgtcggtggttcgattccgcctctgggcaccaaaatgtggcggtatagcttagttggctagagcgttcggttcatacccgaaaggtcataggttcgactcctattaccgctactaaaatttaatgtgggccattagctcagttggttagagcgcccggctcataaccggtaggtctggggttcgagtccctgatggcccaccacattaaattaacttatggtgggtatagctcagttggttagagcgccagattgtggctctggaggtcgtgagttcgactctcattatccaccccaacttatatggtctattagctcagtcggtagagcacctgacttttaatcagggtgtcccgcgttcgagtcgcggatagatcaccaaaaaggcggcgacatagccaagtggtaaggcagtggactgcaactccttgatccccagttcgaatctgggtgtcgcctccaataaaatgcgctcatagctcaactggatagagtgtctgactacgaatcagaaggttaggggttcgagtccctttgggcgcaccatatgaatagcgagggattatagctcagctgggagagcacctgccttacaagcagggggtcacaggttcgagccctgttaatcccaccagtgcaaacctctagtaaaactactagaggttttatttttgattgaaaaagtttttatatttaggaggtaagaaatttgtatatagtaataggaaatgaaatagttgatagtgaagaacttaaaataattatagatgaaaatagtaaatttaaagttgaaaaagatttaagtaaaagcacaaaaagagaagatgtaatagcatatcagttaagtatagatttaaattacctagattctcttataaatgagcaatgtaatttgtccagtttatctgatgaagagaaatttgatgaatatatgactttgtctgatgaacttgcactggatttagaagagttaatgccaaaatatacaataataaatgctagagcatataaattagacgaggtagatggaattgtaaaaataatactagctgtagcgtatgcagatttagggcacttaaaactttctgatgtagtaaagaggctatctagacaagtagattaggatatgaatatgaactatattaaaaaaatgtataaaatcttacgtaaagatgaaaataattatgtaaacatagaaaaaaacagtataaaatcaagtcaattgtagaaattttcacataaattcatctgaaattctataaaaaatgccttaattttaatgaggtaaatcgagtttacacagtctaaaaattacttatatttataaatttatcttattaattaaggaactttcttaaacatcttcaaaaataaagtattttagtctataatctttaatattacacaaacaataaaggagaagaatagagtatgcttaaaaagtttaataaaatactagtggctaatagaggcgaaatagctataagaatatttagagcctgttcagaattggggataaaaagtgttggtatatacagtaaggaagataagtatggattgtttagaacaaaagcagatgaatcatatttgataggagaaggtaaagggccaatagatgcatatttagatatggatggaataatagacctagcaaagagaaaaaaagttgatgctatacatccaggatatggttttctagcggagaatgcagaatttgctcgtaaatgtgaagagaatggaattacttttataggaccatcatctaaggtaatgaatatgatgggggataagattaactctaaaaaaatcgcaaaagaagttaatgttcaaactataccaggagtagaaaaagcaataagaagtactgaagaagcaaaggaagttgcaaacaaaataggatatcctgttatgataaaagcatctaatggcggtggcggtagaggtatgagaattgtacatcgcgaagaagacttagaacttgaatatgaaactgcttgtagtgaatcaagaaaagcttttggagaagatattatatttatagaaaaatatatagctgatccaaaacatatagaagttcaaatattaggtgataattatggaaatatagttcacttatatgaaagagattgttcagttcaaagaagacatcaaaaaataatagaatatgcaccagctttttcgttagatgataaagtaagaaaagagatatgtgaagatgcagttaagttatcaaaacatgtgggttattctaatgcgggaacattagaatttttagtagatgcaaatggtgggcattattttatagagatgaacacaagagtacaggttgaacatactgtaacagagatggttacaggaatagatatagttcaaagtcaaatactaatagcccaaggttacagcttagatagtgaagaaattaatataaaatcacaagatgatgtggaaataagaggttactctatccaatgtagaataactacagaagaccctaagaataaattcatgcctgatacaggtaaaattcaagtttatagaactggttcaggatttggtataagactagatggaggaaatggatttacaggggcaaacataagtcctcattatgatagtttattggttaagacaatatcttgggatagaacattccaaggagcaataaataaaactataagatctataaaagaacttagagttagaggtgttaaaactaatgtaggattcctagttaatgttttaaataatcctatattctcaaatggtaaatgtagtactaagtttatagatgaaaatccagatttatttgaaataacagaaagtaaagacagaggaacaaaattacttcaatttataggagatgtaattgtaaatgataatgcttgtaaagaaaaaccactatttgatgcattacatgacccaagaatggataaggatggttcaaaatcagaaggaagtaaaatacttttcgataagttaggtaaatctgcatatatagaaaagataaaaaatgataagaaattactattaacagatacaacaatgagagatgcacatcaatcattattagcaacaagaataagaacatatgacttattaaaagctgctaagccaacagaaaaatatcaaaaggatttattctcacttgaaatgtggggaggagctacttatgatgttgcatatagatttttaaaagaatctccttggcgtagattacaaaagctaagagaagaaataccaagcataatgttccaaatgttgcttagagcatcaaatggagttggatataaaaactatccagataatgtaatagaagaatttacaaaagaatctgctagacaaggtatagatgtatttagaatatttgattcattaaactgggttgaaaatatgaaaccatctattaatacagctttagaaactggaaaaattgttgaagcaactatgtgttatacaggtgatatactagataagactaaaactaaatacaatctagaatattatattaaaatggcacaagaattagaaagcttgggagcagatataatagcaataaaagatatgtcaggtcttcttaaaccatattcagcttacacactagttaaagagttaaagaaaaatgtaaaagcaccaatacatttacacactcatgatacaagtggaaatggtgtagcaacttgtttaatggcgtcagaagctggagtagacataattgatgctgcattagaatctatggcaggacttacaagtcagccatcgcttaatgctatagtagaggcacttaagaatacagagagagatacaggaatagatttatttggatatgatgagttaggaaaatattataaggatttaagaaaagtttataataaatttgaaagtgatttaactaattcttgtgcagaaatatataattttgaaataccaggaggccaatatacaaacttaaaacctcaagctgatagtttaggattagttaatagatttgatgaagttaaagaaaaatataaagaagctaatgaagttgtaggagatataataaaagtaactccatcttcaaaagttgtaggagacttagctatctttatgactaaaaataaattagataaagacaatataatagaagaaggtaaaaatttatcattcccagattctgttgtggattactgtaaaggtatgattggtcaaccagaaggtggaataccaaaagatttacaagaggtagttctaaaaggtgaagaagctataacagtaagaccaggttcattattaccagcagaagattttgatgaaatagctaaatatctaaatgaaaagtatgatataaatgctaatataagaaatgttataagttatgctttatatccaaaagtatatgaagattatatcaaacatctacaacattataatgatatatctaaacttgaaagtgatgtattcttctatggattaaataaaaatgaagaatgtgaagtagaaatagaagaaggtaaggtattaacaataagattagttgaaattggtgaagttaaggaaaatggatttagaactataggatttgagttaaatggaatggttagagaagtagaaataaaagataagaatttctctggaaaaattaataatgttgaaaaagctgatatgaatgaccctcttcaaattggagcaagcataccaggaaaagttataaaaataatggttaaagaagaagatgaagtaaaagcaaatcaaccattaatcgttatagaggctatgaagatggaaactataatagttgctaagactgatggagtaattaagtcaatcaaagtaaaagaagatgatatggttgaagataaacaattattaatgataatgaagtaatttaattaaaataaattaaaaagcactctgaaatgtttaataaaaaatgttttagagtgtttttatttattttaattaaatatttgttaaaaaaaagaggacaattacctccagatgtagaaataaagctagtaaggaaaatgttatctaaaaattctaaatatagtaaatattttccataatatttcttaggaaataacagcaaagataaaatacataaatttaaaaggtgggtgcttatatgaaggtttatgatagtaaaatgttgagaaatgtagcagtattaggacatagcggatgtggaaaaacaaatctaatcgaaactatagcttacacagcaaacactaataagatacctaaattaacagacaaggtaaatatgacttatagcatgggattaatacctatagagtataatgattataagtttaacttattggataccccaggatattttgactttagcggagacgttgtgtcatctcttagagcaagtgatgcagcaataatagtaatagatgcaacagcgcctattcaagttggtacagagaaatcattagaactaactgagagtattcctaagataatgtttataaataaaatagataatgaaaaggcaagatacaaagatgcaatagcaatgttaagagaaaaatacaataataagatagttcctatgataagtcctatatacaaagataaaaactttgtaaagttacataatgtttttgaaaacatagatgatttagaaggtgaatttaaggaacaagctatgagtgttaaagaagcattaatggaacttatagcagaaactgatgaccaaatattagataaatattttaatggagaagaactaactacggaagagatacaaaaaggtattattataggtatacaaagaggtgatattatacctgtaatatgtggttcaactataaataatataggcacaaaggaaatattagatacaatatcaagttatttagaacctatctttacagaggaaagcaaaccatttaggggattagtatttaaaactatggttgacccatttgttggaaagatgtcatatataaagattactgagggtgtactttctaaggataaagatgtttttaatataaataaaaatgtaaaagaaaaaatagctaatatatatacattgagaaatagtgaattagtagaaatagaaaaagctaaagctggtgatatagtagttataactaaagttaattctctaaaaacaggagacactatatctgcagataaagatgcagaagctttagaaaagatagattttcctaaaccacaaatatattatgcagtaactcctaagaataaaggtgatgaagaaaaagtagcatctgtattaaataaactagtagaagaggaccctacattacattggtatagaaatacagagacaaaacaagcacttttaggaggtcaaggagaacttcatataaaaacaattaaaaataaaatgaaagataagtttggtgttgatgttgaattgaatgaccttaaagttccttatagagaaactataaaaggaacagccgatgtacaaggaaaacataaaaagcaatcaggtggtcatggtcaatatggagacgtaaaaataagatttgaaagatgtgaatctgattttgaatttacagaagaaatatttggtggttctgtaccaaaacaatatataccagcagttgaaaaaggtctaaaagactctatgcaaaaaggtatattagcaggttatcctgttacaaacataaaagctacgctttatgatggttcataccatgatgtagactcttctgaaatggcctttaagatggcagcaagtgcagcctttaaaaaaggtatggaagaagcgcacccaatactactagaacctataatgaaacttaagataactgttccagaagaatatatgggagatgtcatgggtgatataaataagagaagaggaaaaatatttggaatggaaccagatgacaaagggaaacaaataatatttgcagaagctccacaagcagagacatttaaatatgcaatagatttaagagcaatgacacaaggtagaggatactttgaaatggaattagagagatatggagaggttccatcacagtttgcagaaaaaataattgggttagctactgcaaagtaatgaacaaaataaatagaaaaataattaatatatattattaaaaatatttttagggttttaactaggtataggtttatgttaggtaaacttatacctagtttttatacatttttgatgaataaaaaaatatataatactttcttaaatgttttaataaaaagaaagtatttttttattattatttttacaaatgtttagtaataaagatgagaaggtatatttaaaatataaagtatttaaagttctgaaatctaatcatgaagcaaaaaattagcatttggttatcaataaatataataaataaaaactcataattaatgaaagaataaattcatatctaaatttctataaaaaatttaaatttatacaatttagggctttaaaaatttaaataataggtgtaaaataatagtcaaagaaagtcaaaaataaaaaggtgtgtggtgatattaatggcaactatgacagatataattgaaaaatttattaaagatttgatggaagaagataatagcatacaaattcaaagaaatgaactagcaaacttgtttagttgtgcaccatcacaaataaattatgtcttaacaacaagatttacaatagatagaggatattacattgaaagtaaaaaaggtggcggaggatatgttcaaatagaaaaaatacgaaaaagtaaagatggacatattagagaactactaaatgaaaaaataggaagtcagatatcctataaaaaagcaaaggaattattagaaggtttaaaagagtcggatttgattaacgaaagagaattaaaattaatattatatgcaatagatgataaatcattgtgtatgccaatatatgaattaaaagagaaggtaaggtctaatattttaaagaatataataataggattatttagtatagaggagtgataatttatgctatgtcaaaaatgcaataagaataaagcatctgtatattataataagatagtcaatggagaaaaaacagagatgtatttatgtagtgagtgtgcaaaagagaatacagaaatgaattttaacttagatatgcctttttcaatgatggatatattttctaatttaggttttcaacctaaaaaagaacttgaggaaaagctagtttgtcctaaatgcaatacaacatatagtgagtttaagaataatgggagatttggatgtagtgaatgttataatgcatttagtagtcaagtaaatccaatgcttcaaaatatacatgggcatatagaacatacaggaaaagcacctaaaaaatctttttataagataagtgtagaaaatgagattaaagaactaaaagaagatttagatagagctataaaaaatgaagagtatgaattagcagctcaatttagagataaaattaaatatttaaaaggttctattgactaagattggagtgatattatgaaagagaacatagtcatgaaatcaagagttaggctagctagaaatttaaataactatccatttccaaataaattagataaagaatgtgccatggaaataatagaaaaagtaaaaaatgcgtttattaattctaacttagaacaaaaagaagaatttgatttctataaaattgaagatttagaccaatctaaaaaaatgcttatggttgaagaacatataataagcccagatttagcagaaaatgataaaagtgcagttatagtaaaaaaagataaaactataagcataatgataaatgaagaagaccatataaggatacaaactatatgtgatgatttaaacttagaatatgcatatagtgtagcaaatgaaatagatgatttgttagaatcaagtttagaatatgcctttaacacaaagctaggttatctaacatcttgtccaactaatacaggaacaggaatgagagcttctgtaatgatgcatttaccagcattaagtcaactaggctatatggatgaactttataaaatttcatcacaaataggtatagcaattagagggatatatggagaacgaacagaagcattgggaaatatatatcaaatatctaatcaacttacacttggaagaacagagtctaatattatagaaaatgtaagtggacttacaaaagatgcaatttcaaaagaaataaaagctagagaaatattgcaaaaaaaattaggtataaaactagaagataaaatatttagatcgatagggacacttgaaaattcaagagtaatgagtagcgcagaggcaatgagccatctatcaaatataaaaatgggaatagaaatgaactatatagataaactagatttaagggctatagaacaacttatgataggtatacaaccagcgcatcagtcaataatgtataagagtgatgatgttgagaatagagatataaatagagcaacatatattagagaaactttggaaaaattaagaggagggatgaattgtgaacttcaatagatttacacaaagagctaaaaaggcaattgatttagcgtttgaatctgctaaaagtctaggacacaatattgttggaagtgaacatatacttttaggtcttttaagagaagaagaaggtatagctgctaaagttctaagtaaagttggatttacagaagcttatttagaaggcaaaatagttgatatggaaggtaagggagaagaaatctcagaagatatagtattaagtccaaggagtaaacaaatacttgaattatcaggaatgtttgcaaataaattaaaaacaaattatattgggactgagcatatattattagcaattattcaagaaggtgaaggaatagctaataagattttaaattatgctggagtaaatgataggactttagcccaattaacaattgatatgatgggtattagtgataaaaatcaatacaaagcagagaatagttacacgggcaaccagaatcaagcagaatctaaagtacttgataagtatggaagaaatcttacactatatgcaaaacagaataaaatagaccctgtaataggtagagaaaaagaaatacaaagagtaatacaaatattaagtagaagaactaaaaacaatccagtgttgataggagacccaggtgtagggaaaacagccatagctgaaggtctggctacaaatatagccttaggaaatgttccagaaacactaaaaaacaaaactttatactctttagagatgggttcattattggctggggctaagtatagaggagaatttgaagaaagaattaaagaagttgtagatgaagttgttaaaaatggaaacataatcttatttatagatgagatgcacacaataataggggctgggtctactggagaaggctctatagatgcttcaaatatattaaagccagccttggcaagaggagaaatacaagttataggtgcaactacaattgatgaatatagaaagcatgttgaaaaagattctgctctagaaagaagattccaaccagttatggtagatgaaccaactaaagaggactcaataaaaatattagaaggattaagagataaatatgaagctcatcataaagttaaaataactgatgatgctataaaggcagctgtagaattatcaactagatatatatcagacagatatctgccagataaagctatagacttgattgatgaagctgcatcaaaagtaagattaaaagaaaatacacctccttcagaaataaaaaaattagaactagaaatagaaaatatagataaagaaaaagaagaagcagtaagatgtcaagactttgagaaagcagccaaaataagagatgaacaaggtctacttaaaaaacaattagaagatgttagagaaagatggaacaagtcatctaaacattcagatttagttgatggagaagttattgctgaagtagtgggcttatggacaggaataccagttaataaaattcttgaagaagaggctgatagacttttgagacttgaggaaatactgcacaatagagttataggtcaagaacaagcagtaaaatctatttcaaaggcaatcagaaggtcaagagcaggtcttaaagaccctaatagaccaattggttcatttttatttttaggtccaacaggagtaggtaaaacagaattatctaaggcattagcagaagtgcaatttggagatgaaaatcaaataattagaatagatatgtctgaatatatggaaaaacatgctgtgtcaagaatgataggttcacctccaggttatgtaggtcatgatgaaggtggtcaattaactgaaaaagtaagaagaaatccatattcagttatcttatttgatgagatagaaaaagctcatccagatgtatttaatattctgttacaaattctagatgatggtagactaactgattcaaaaggaagaactgtagattttaagaatactattgtaataatgacatcaaatgttggagcatctacaattggtagacaaaaaactttaggatttagtatagctaaaggagacgaagaagaaaaatctcaatatgaaaaaatgaaagaaaatataatgggtgaattaaaacaaagattcagaccagagtttttaaacagaatagatgatataattgttttccactcactaaatgaaaatcatatatcaaaaatagtacttttaatggcagcgaaactacaagagagattaaaagaaatggatataaaattagaaatgagtgatgaggctgttaaattaatttctaaatctggatttgacttagaatatggagcaagacctcttaaaagagctttacaaaaagagttggaagatgagctatctgaagcaatcttaaaaggtaatgtgaaaaagggaagtaatgtagtagcaaaagtcaaagatgaaaaaatagtttttgaaactaaataatttaatagagttgcattttaaaatattgcaaatataagttttataatctaaacaaaattttaagggcaatgaatctataataattcattgtccttaattattttatttaatctttacatattgtctttcagatatgctaaaattatagtatagaataaaaaattaaggatgataaaagtatggcaaaaataaaaacaaaatatgtatgtcaatcttgtggatatgaaacagctaaatggcttggtaaatgtccagaatgtacaaaatggaatacatttgtagaagaaatagaccaaaaaagcaccaaaaaagaggtctttataatagataaatcttcatctaaaccagtcagtataaactcaatagaaagtaaagaagaagagaggtttacaacagatataaatgaattagatagagtgcttggaggaggtatagttaaaggctctttagtgcttgttggtggtgaccctggtataggtaaatcaacacttttaatccaagtatctagtaatgttgccaatttaggaaaaactgttttatatataactggagaagaatcagaatctcaaataaaaatgagagctaaaagattaggtattaactcagaaaatttatatatatttgctgaaaataatttaagtataattgaatcttatttagaaagtgtaaatccagaattaataattctagactcaattcaaactgtcttcagtccagaaatatcctcggcaccaggaactgtcagccaaattaaagaaggtacttcaaaattcatgaaaatttctaaaaaaatgggaatttcaacgttcatagttgggcatgttacaaaagaaggttcactagcaggaccaaaattattagagcatatggttgatactgttctatattttgaaggagaaagatataatacttatagattagtaagagctgttaaaaatcgatttggttcaactaatgaacttggagtatttgaaatgagggatttaggattagtagaacttgataatccatctaaaattttaatctctgaaaaaccaaaagatgtagcaggttcagtaataatatctactgtagaaggtacgagaccaatgttacttgaattgcaagcattagtttctcctacaagttttggtataccaaaaagaacatctacaggagtcgattacaatagagtaggtatgttattagcagtattagaaaaacgtgttggtttgcaaatacaaaatcaagatgtctatataaacatagttggaggaataaagataaatgaaccctcaattgatttagggatagccatttctgtagcatctagttttagaaatataccgatagatgaaaatatagctgttacaggagaagtgggacttacaggagaagttagagcagtaagctttatagaaaagagaatagctgagtgtaaaaaacttggatttaaaaagatagtagttcctagaagtaattatgatgttgtaaaagagaccaaaggcatagaaatatggccagtagataacttaagacaagctataaatatagtacttgggaggaatcaataaatatggagaattttctagataataaaaatatgctatatgcattaaaaatgatatctcctggaactccacttagattaggtctaaacaatgtactaagagctaagactggtggattaattgtaattgcaacaaacgaagatgtaatgaaaatagtagatggaggatttgctataaatgcagaatattcaccatcatatctatatgaattagctaaaatggatggagctatagttttaagtggtgatgtaaagaaaatattatttgctaatgcacaacttatacctgactattttatagaaacatcagagacaggaacaagacatagaacagcagaaagagtagcaaaacaaactggtgctatagtcataggaatttcacaaagaagaaatgttataacagtttatagaggaaatgagaagtatgtagtcgaagatatatctaagatatttactaaggcaaatcaggctatacaaactctggaaaaatataagacagtattggaccaagctgtaacaaatttaaatgccttagagtttaatgatttggtaactatttatgatgttgcattagtcatgcaaaagatggaaatggtaatgagagttacaagtataattgaaaaatatgtgatagaattgggtgatgaaggaactttagtaagtatgcaattagaagaattaatgggtacaaccagaatagaccagaaattaatattcaaagattataataaagaaaacacagaaataaaagaacttatgaaaaaggtcaaaaatttaaattcagaagaactaatagaattggtcaatatggcaaaactattagggtatagtggtttttcagaaagtatggatatgcctataaaaacaagaggttataggattcttagcaaaatacatagactaccaacagcaataatagaaaacttagtaaattattttgaaaactttcaacaaattttagatgcatctattgaagaattagatgaggttgaaggaataggtgaaataagagcaacatatataaaaaatggactcataaaaatgaaacaattagtcttattagatagacacatatgatgaattttaaatgaattttactacttttttcttgaatataatatacactttggtctataatagataagtataactagggggtgaagcattgataaggaaagtaacaagaatattgtttattttacttggatttacaataggtataacaacctatttaacattaatgaaagattttgaaatattaacatttggaaaagaaacatatggttatatcgcagctgtagtagcaggtataataatagccattttaggatatcttatagaaccatgggttgtaaataaagtaaaagaaattgctaaaatagtggataaagaattgtcaaaatatcctcagactgatatattgttagggtctatgggtcttatagtaggatttgttattgcgtatttattaagtggattagtaaatagaataccaatagtaggtggaatactatccttactattatatttattcctaggatatcttggaatgaaagttgcgcttaaaagtaaaaatgatttatttaatattggaaaactaggaagattagcaaatcctattaaggataaagataaggataaagaaaataaaaaagaagtaaaagccattcctccaaaagtattagatacaagtgtaataattgatggaagaatagctgatatttgtaagactgggtttatagaaggaaaacttattattcctgcttttgttttggaggaactaagacatattgcagattcttcagatgatttaaaaagagtaagaggtagaagaggtctggatatattaaatataattcagaaagaattaaatatagaagttgaaataagtgagagagactttgatgatatagcagaagttgatagtaaattattaaagcttgctcaggttttaaatggaaaagttgttacaaatgattataacttaaataaagttgctcaattccaaggtgttgaagtattaaatataaatgagttagctaatgctataaaaccagttgctataccaggtgaagatatggttgttcaagtggttaaagaaggaaaagaggctcaacaaggtgttgcatatctagatgatggaactatgatagttgttgatggaggaagaaaatatatgaatgagactataaaagtactcgttacttctgttcttcaaactcctgcaggtagaatgatatttgcaaaacctaaaaattaatatgttcaaagaaacctataatttgggctgtttattttaaatagatggtccaaatttatttatttataacgataatgtttaatgtattcttaaagatggggatttaaatcagaaagcagggagaatttatgagaaaaaagattatatctttcttagcaacatttatcataatattaacatcagcaagtcagtatagttttgcagatgatatgtcaacacgtggaaaagtaatatttatagatatgaatagaactagtatgagtaatatgttaagaataaaatcattaagagaagaactagacaatagagggtatattggcttgatgaatataagaggcgataaaggaagtgatgatagaaggtcatatgctagtatgggtgctggtggtagagctaatgtggctaatgaagaagatattaattttgaaagctcgagtaaggatagaaatatagtttttgaatcagctacaggaaaaagtgcaaaaggtataaataatttaactataaataagtctataaatgaaaatttaaactttggagagtatggttctgtattagggtcattaggacaaagtttatctgagaatggattaaaagcatctgtattgggtaattcagatataattgaaaatggtcaacttataaaaaatagaaacttatgtctaactgcaatggatgaatatggaagaatacctaatggaaatgtagatactataaataaaaaagacttatctatgccttatggaatatcaactgattatgataaattgattgtagagaccaaagaagcttacaaaaataatgatgtggtttttgtggagcttggagacacatatagattagatttatataaaccaaatttaaatgaaaaaacatatgagagtgtgaaagataacatagaaaaaaatatagatgtatatttaaaaaatatattttctatggttgaagaaaatgacactgtctacatagcaagtgcatttccaagtgatttagattataaaaataaaagaagactttctccaataataaaattaaatggagaagggaaaggtatattatcatcttcaactactagaagagaaggtattgtaacaaatttagatgttggggttgaaatattagacaactttaatataaaaaatcaaaatatggttggaagaaaatatgaacttattaacagagatgataataaagaatttttgatggatgaatatcaaaagatagtatctatttcaagcataaggtctacaatactgaatggttttgtaagtatagttttcttgtcatggatagttgctatgattgcaattttatttagaaagcatatatcaaaaaattataaagaaacaacattttttatattaaaggaacttttaaaaataggaatagtaatgccactgtcatttatgataacaccaataatgaatttcaaaacaccattagcaatatctttaggaataattataataacacttactatatatcttataagtaaagttttaataaagaatgatttaaaaaacatgctgttttttactggattaaccatagtaattatggttattgatgctgggtttggctcatatttaatgaaaagcaatgttatgagttatgactgtataattggagctagatattatggagtgggaaatgagtatcaaggtgtggcaatcggtagtgcaatatttacatttgcaattttacttacatataaaaatataccaaagtggtctataatagttttttctttggttatcttaattacaagtgcatctccaattatgggagcaaatgttggaagtgctatttctgaatgtgttgcatttttactatttatactattgatatataatgtgaagatagacttcaaaaaaattgtattattaggtatagcagtattatttgtattaggagtttttgtagcaatagatatgattttgggaagtaattcacatttaggtatgtttgtaaaagaaatttactttaatggaccaggagaaataatacaaacatttagtagaaagatagagatgaatttaaagctagctcaaaccagtgcatgggtaaatatactgttaactggaataggtgtaattttagttcttatgattaatcagattagatactttaagcaactgatggatgagtatccaattgtatttaaaggatttatagcatcaatagcaggatgtttagtaactcttttagtgaatgactctgggattgtgtcatcagctacagcctttatttatgtaattgtacctatgataacattaagtataaatctcacagcattaaaagaataagtactgtatgaataatatgtaaatatgaacacattaatttaacttctttatttacaaaataaagaagaaagtttataaaaaataaattataataaaaaagagtttacctcaaaattgattattctaatcaaattttaaggtaaactttttttattataaagataaataacatataacctcatattttaggtagatttttttcttatatgtttaggagtgcatttaaatttttccttaaaaattctgtaaaataattttgtattagtaaatccatgagcttctaatatactgcataaggtatcatttgtgttaattaagtctttataaatatgagaaatacgcacatcatttaaatactctaagtaagtttgtcccatatactgtttaaattttctacaaaaatattctggctgtaagtgtgctaccttagcgattttgttaatagaaataggcattttgtaattaatctttgtatattctaaaactggttcaaattttgacaaatcaagtactgtttttttcatatttttattacctacagatattttaaagtttgtatataattcaaataaaagttcaaataataagcttgtaaagagcagattagctgcaggaggagagctaagtttaatttctctcatgttttctaatataagtttaactttacctgaattttttttatagttattgtcattggcattaaccttaaagtcaaaatagcaatttttaaaatcagggatatatttgtttagaaaagacaatggtacttgcaataatatagaggtatcttgataagtacatctagttgagtgaataattccagaattaatgaacatacactcattagcttttaaattataagtgtaaccctccatgttaatttgtaaatcaccagaagttatataaattatttctaatgagttatgccaatgatttgctacataactaccactatcatcaaatagtttgaaattaacatctaaattatcaataggttcaattatttcatgtgaaaaattatttctgttcataataatatcctccttataattttaaattataaatagtaaatttataatgttcaatattaaaaagataatatagactaataaattagataataaacatacttaagaaaacggataaaatcaaatataataactgtatattaaaataacttaaaaaaattattttattataagtgcaaaatatacctatttaaataagataagaggggaggattttatgtgtatataaaaggtgtaaatttaggaggttggttagttttagaaaaatggatgacctcaagtttatttgaaggcacagaagctgaagatgaatactatttaccaagacagctttcaagagaggcatatgaatctagaattaagactcatcgtagtgaatacatcacagagagagattttgcaacgattaaatctatgggatttaattcagttcgtataccagtaccatactttatttttggagattgtgaaccattcataggatgtgttaaagaacttgataaagcatttgcttgggcagataagtatgggcttagtatattgatagacttacatacagttccaggaagccaaaatggatttgataatggaggaatatcaggtatatgtagctggtcacaaaatccagaatatgtagcgtttacattaaatgtattagaaagacttgcaaaacgttatgggatgagacatgaattgtatggaatccaaattttaaatgagcctataacagaaagaatgtggaacataatgaatgttccaaatcggtttaaggctgtagataaggagatggcaagggggagtaaacctaattcattagagtttttacgtgatttttatataaaagcatataaggtaatgcgtccttatatgagagaggaaaacgttatagtgtttcatgatgcatttgaattaaaagcatggaaagactttatgagagaggaagaatttaaaaatattgttctagatacacaccaatatttgatgttagctgaatcagatggatgtgaacaaagtattgatagctatctcaaatatattagagaaaattatgctaaagatattttacaaatgcaaaaatattttcctgttatatgtggggagtggagcttatttaattcatatgcttgtggtatagatacaaatggaggtcaatcacctctaaatgggattgaatcaaatatagataaattatcaaaagacgataaaagagaattatataggaagatagcaaaagcacagcttgatgcatggagaaatggaagtggtcactactattggaattataagttattactagatacagttaatgaagaaggttggataggatgggatagttgggacctaggcaaatgtgtagctcaagaatggtatcctatagaatattaaactaaaattggaggaaaagatatgattaaaaaccctatacttccaggttttaatccagatccttgtatttgtagaaagggagatgattattatcttgtagtttcatcttttgaatggtttccaggtatacctgtttatcactctaaagacttaaaaaattgggagttatatactcatattttgacagatgaaacaaaaatagatttgaagaagcttccttcatctaaaggaatttgggcaccttgtttgacttattgtgaagaagaagatttattttacatagtttatggaattatgaactctatgaatgcaagatattttgatgttgataattatttaattacatcaaaagatataaagggagagtggagtgaaccagtatatatacactcatcaggttttgatgcgtctattcttcatgatgatgatggtaaaaagtggattgcatcattagactgggagactagagaaggatatgaaaaacctggtgttatatgtttagtggaatactgtacaaaaaagaaagaaatagtaggatatccaaagagaatatggtcagggggaactgatagaggttgtattgaagcaccacatataacaaagcgtggagattactattatataatgtgtgcagaaggtggaactggatatggtcatagtgtaactatgggaagggctaaaaatatatggagaccttatgaaaaagattcaatgaatccaattgtaacttcaattccaggcgatttttatgaaagacatgaccctgaccatctaaagcctaaatactataatccagaatcaaaacttcaaaaatctggtcatggaagctatatagaaacaacatcaggtgaagtatatttagttcatctaacatctagaccatttgtaccagagttaaggtgtactttaggtagagaaacagctattcaaaaaatgaaatggacaaaggataattggcttcgaatggaagatgaaagtaatttggcaaaagaatacgtatcagaaagtaaactagaagaacatttagtttcatctataccaagttttgatgactttgattcaaatgtattaggtttacagtactatgctcctaggatttcaccattatcatttgcagatgttaagtctagaccaggatatgtaaggattagaggtcaagaatcaagaacatcattaaataaagtaagcatattggcaagaaaattaacttcagtatatgcaagaataaccactaagatggagttttacccagaggtacatcagcatagtgcgggtttgataatgtattatgataatatgaattatataaatttaagaaagtattatagtgaaacattgggtcaaagtgcactatcaataatacatcttgaaaatggagagaagacggaatttttaaatactaggataccaataaaagatataccaatatatcttcgtctgtatatacaaggtcgtaagtcatattttgaatggagttatgatgaaaaaaactaccaaagaataggaaaggtatttgatacaactaagttttcagatgagtactgtaaatatggagaatttacaggtacgtttataggattaacttgtgcagatcgtgtaaagcataaacactatgctgattttgatttttttgaatatatagcagatgaatcaaaagatgtcgattaataaaatcattactaaaattttcagagcaaaggtaaatcttatgctctgaaataagaaacattagaaggcaaatcttacaaaaaggagtatggtattatgaatacagaagttaatgttaaagcaactacgattagatatgaaaagatttcattttttgaaagaatttcttatggttgtggggatttggggtgcaatatcatatactcagctatgtcagcatttttgctgttttattatactaattatgcagatgttagtgcagcagctgtaggtagtattatgcttgtatctaggatactggatgggtttagtgacttaacaatgggaattatagtggatagaactaaatccaaatacggtaaggctaggccttggattttgagaatggcgattccttttgctatagcagcagtattattattttctgttccatcaaatcttggtatcacttctaaattaatttatatttttattacatataacttagtttctactgttatttatacagcaatcaatgtaccctatgcaactctaaattcacttataactcaaaaccagtatgaaagaggagtattaagtatatttagaatgatattagccacttgtggtaccttactaataaatggacttacactacctctagttgaatactttggaaataatttatcagcatggactaaaacattctttgtatttggaatagcatctataatggtattttttataacatttactggaaccaaggaaagagtaaaagcagttaagcaagataggaatgaagtaataccatttaaaataggtattaaatctttatttagaaataagtactggatacaaataacattatgtttagtttgcatatttattgtatttgcgataaatggtggttcatccgtatattatgcaaagtttattttgggagatgaaaaattatttggtcctataaatatggtttcaaatatatcccaaattatagctatgtttatggttgctccttttataaaaaaatttggaaaaagaaatgtattaatagtaggttcaataatattaatatcgtcaaatgttatgtttataatagttggacaaaactatataggagtaatatttgcaagtgctataaagggaataggaagtgctggaatagcatcaacaatgtttgctattgtttcagatactattgaatatggagaatggaagactggatatagaactgaggggcttataaatagtgcatctagttttgggtttaaagtgggaaatggattaggttcagcaatattaggtgcagtattatcaattggtggttatgtaggaacatcagctactcaaagtgatttagctatagtatcaataaaagtatgttttatatacctacctatatttataacaatattacaaattatcataatgtttttttataagcttgataaagaatatagtactatacttaatgaattaaatactaaataatgaaaaagtttcttataaagtcttaagtttaattaaggtctattgtaaatgttccctataaaaactattatatatttatgattattgaagaatttttagagaagcgaataataaaaatataagaagactttaaatgatgaaatggttggtcttttagaaatgatttaataagttatttttatttaaagcattataagtggacaattaatttttaatttatggagatgatatttaacaattagaagtaatatataatatgcgctaagaagcaatttttcaactatttatgaaggtggtggtacaagaaaagtatcaccttttttttgttatacaaaaaaacagttgactttttatatgaaccccttctataatgttactgaaattaagtaaaatgattgaacaaatgtaaagataattgaaaagcttgattttggaggaaatcaaatgaaaaaaattggagacttaagattaatgatgaagtgttgttcactttattacgaagataatttgaatcaacaggaaatagcaaatcaattgggaatatcaagaccaacaatatcaagaatattaaaagaagcttttgaacaaggaatagtaaaaatacagatagttgatgttttgaaaaatgattaccaaaaaatagagagaagtttggagagaaaatataaattaaaagaagtaatagtagtagatgataaacaagatgcactaacacaaaaacaagaactagcaagagctgtatctgaatatttaactagagtagtaaaggaaaatgatataataggtgtttcaataggaacaacactaaaagaaataccaagatatgtggaaaaaagtaactgtaaaaatgttacatttatacctctattaggagggattggagacaatgaaatagatattcatgcaaatcaaatagcagtaagtctagcgagggcttttggaggtgattttaaattattacatgctccagctgttatgtctgacttgtctacaaaagagaaactttgcaaagacgaaaaaattaaagaagtactagatttaatagataaaacaactatagcaattgtgggtataggaaatcctatgagtttaaactcaacaataatggcttctggatacatgaatgaagcagatatagaagatttaaaaaaatacaactcaataggtgcaatttgtttacaagcctttgataaagaaggaaaaacttctatacttgaatttaatcaaagagtattaggagtgaaactggaagatttaaaaaagataaaaagaacaataggtgtcgcttcaggagatgaaaaaatagaggcaataaaggcatcattaaaagcgaaatttataaatagtttagcaattaatcacagtttagcacttaaattattagaagattgtgactaatagaaagatagataaaagttaacaggagggaatgtatatgtcaatatcaaaagaaacattgcttgaaatgtataagagaatgaatcaggctagaaaatttgaagagaaagttagttggttttttgcaagaggtatggttcatggaacaactcacttatctgtaggtcaagaagcgtcaagtgtggcggctgtaatggctttagaaaaaggagatttagtatcattaactcatagaggacatagtcaatttataggaatgggaatagacctaaataaaatgatggctgaacttatgggtaaagaaactggattttgtaagggaaaaggaggctcaatgcatatagcagatattgagtcaggtaacttaggagcaaatggagttgtaggtggaggtcttacaatagctccaggagctgcacttacacaacagtataaaaaaacaggcaaaatagttttatgtagttttggtgatggagcatcaaatgaaggtacttttcatgaaggaataaatttatcttcaatatggaaattgccaataatattttactgtgagaataatttatacggtatgtcaacaagcataaaacgtcatatgaatatagaaagtattgccactagagcagcttcttatggaatagaaggaatatcaatagatggatataacccaatagaagtatacgaaacagtacaaaaagctgctgagaagtgtagaagaggagaaggacctgtattaattgaaagtagaacttatagatggttaggtcattcaaaatcagatgcaaatgtatatagaacaaaagaagaaatagaatcatggaaagcaaaagaccctattgaatttttaaaaaattatcttatagaaaataatctatctaatgaagatgaattagataagattcaagaatttgcaaagcaatcaatagaagatgcagtagagtttgctcaaaatagcccaaatccaaaaatagagtctttattagaggatgtatatgcagactaagaatggtaaaggaggaaaataaaaatgagtacaagggaattaacatatgcacaagcaataaaggaagcaatgtcagaagaaatgagaagagatgaaaatgtaatatttatgggagaagatataggaatatatggaggggcatttggtgtatcagttggtatgatagatgaatttggaccagaaagagtaagggatactcctatatcagaagcagctatagcaggagcggcagcaggtgcagcagcaactggtttaagacctattatggaagtaatgtttatggactttgtaacaatttctatggatgcaattgtaaatcaagcggcaaaaatgagatatatgtttggaggaaaagcacaagttccaatggttgttagatgtccaggtggttctggaactggttcagcagagcaacattcacaaagtttagaagcttggttttgtcatgtaccaggagtaaaagtagttgcaccttctacaccagcagatgctaagggattgttgaaagcagctataagagataataatccagtcatatttgttgagaataaattgttatacagaaaaaaaggttttgtgccagaagatgattatgtaattgaaattggaaaggcagatattaaaagagagggtactgatgttacagtaattacttatggaagaatgttacaaagtgttgaagaagcagcagagactctatcaaaagaaaatataaatgttgaaattatagatttaagaactttatatccattagataaagagactatagtaaagagtgtatgtaaaactgggagagttttaatttgccatgaagcagctaagactggtgggctaggtggagaaatatcagccctgataacagaaagtgaatcatttgattatttagatgctccagtaaaaagaatttgtggaaaagatgtgccaataccatataatccagagttagaaaaagcagttgtcccaagagttgatgaaatagaagaagcaataaaatctttaattgttagataaggagggatagatatggtggcaaataaaataaaagccacaccagcagctagaagtcaggcaagaaaagacaatataaaattagataggctgattggaagtggagaaaatggaaggattcatttagtagatgtgttaaattatttaaaagataataaagcaaatactactcctttagctagaagaatagcagaagatttaaatatagatttagaaactattgtaggtactggatatagtggaaagataagaaagtgtgatgtggaaaaattaactgcaaaagaaactattgtatcaaataatacatctaaatatagtgagaaaaaagagctgaaaattgaaaatgaaaattcaagcatgtttaacacagtagaaggaatatttgaaaagccaaatccaatgagagctactgtagcaaaacgaatgtcagaaagttattttagtgctcctgtatttacattcaatatagaagtagatgctacagaattgaaggtacttagagcaaagttaatcgacacagtaaaagaatcaactggagtaaaattaactatgacagatttaatagtaatggcagtatctaaaatacttccaaatcatcaagccttaaattcagcatggacagatgagggtatatttagatataaagatgtaaatatagctattgcagttggtttagatgaaggcttatatgttccggtagtaaaaaatgcaaacaaaaagtctttaaaagaaatagcaaaagaaagcaaagaacttgcggaaaaagtaaagacagggaaacttatgccagcagaccaagaaggtaatacatttacaataagtaatgttggaatgtatggtataactacatttacacctataataaatatgccttcaagtgcaatcttaggggtaggtgctacacaagataagtttgttccagtaaatggagaggctaaaataaaacctataatgaacttatcattaacatcagaccatagagtaatagatggaacagtagctgcaaaattcttaaaagatttaaaagaattgttagaaaatcctttatcaatgcttgtataggttttgatatttcgttactgatataaatagtttgaatagattatattattataattgtttcagtaaatttaaagcttttatatattaagaattatttttaacagtaactatatgtgaatatgatttgcttaattaaaatatatgaaaataaataggaggagagcctatgtcagtagaagtaataatgccaaaagcaggagtagccatggaagaaggtactatagtatcttggctaaagcaagaaggcgaagaagtaaagattggagaacctatactagaaataacaacagataaagttaatatggagatagagtcagaaggagaaggtacacttgctgtaatcatacataaagaggaaggtgaagtattaccagtatttacagtaataggtgtaatagcagaaaaaggggaaaatcaagaggaagtaaaagctaaatatttatctggaaatgtttcaaaagaagatatagttgaagagaatcaaaatatagaagttaaagaagaaaaaataaacaaaaaagagtgtaatcatgattatgatgtagtggtaataggaggaggacctgggggatatttatcagcattaaaagcagctcttttaggtggaagagttgctttagttgaagaaaatatactaggaggtacttgcttaaatagaggttgtatccctacaaagacttatataaaaacagcagaaatattagaagaaattgaccaattatcaaagagaggtgtaaaagtaactgtagataaagaacaggacattaagaaggccataaaatataaaaatagagtagttaaaaaacttacagctggtgttggcggattattaaaaagtagagatgtagatgtgtttaatcttaaagctagtgttaaagaagagcataaagtaattttatcagatggaaaagttttagatacagaaaatataataattgctacaggttccaaagtaaggatattacctataaaaggaatagaatcaaatttaataataactagtacagaagcattagatttggaaacagtgccagaagaattagtaataattggtggtggagtgattggttgtgaatttgcagagatattcaattcaagaggttctaaagtaactatagtagaaatggaagatagagtaatcccaagaatggataaagagttaagcgaatctttaaaatattctcttagtaaaaaaggtataaatgtattaactaaaaagaaagtttctgaatttaaagaagaaggaaataacatattagtgtgcattgaaggtgaagtgccaataaaagcagatttatgtctatatgctataggaagagaagctaatctttctggcatagaggacttagatattaaaatagataaaggttcaatagttgtaaatagtaaaatggaaacaagtataccaagcatatatgcagtaggtgatgttactggaggtgtaatgttagctcatgctgcttttaaaatgggagaggtagcagcttcaaatgctctaggtgtgaataaagaagttgacttaggtgcattacctagttgtgtttatacaattccagaagtagcatcagttggtattacagaagaggatgctagaaaaaaatataatgtaaaagttggtaagtttaattttgctggaaatggaagagctttagcttctggtcaagaacaaggatatgtgaaagtagtagcagatgctaaatatggagaaattttaggtatacatatgtttggatgtggtgtagcagaacttataaatcatgcagcatcatttaaagcattagagatacctactgatgaagcaagtgagttgatatttggtcatccatgtacttcagaagctttaatggaagctttggcagatgtaaatggagaatgtttacacttacctaaaaaataaatctaaacataaattattaatttaagtctattattaatattaatttatatcataaaattttaaaacacttacttagccataccccttattatgcaaataatttatttgtataataaggggtattttttatggaaaaatatagaatatagaatccttgtagtttttgttgtacaaaaaagatagtaatataaaataacattatcattttagaatgatttcaattgtaattaggaaaagtgatttttttgtttttaaaaaaagtattatttgtaaaatataaaaaaaaatttcttaatatttgaataaaagaatagcttaatttaaatgttattactttataaaaaaataataagtacaaaaaaaacaatatatggcatataagttgctatataaataataaggagggaacaattataaatgaggcaaagaataaaaaacttaattgaaaatgaagataagaaaaatcctttaacagatgaagcgatttcaagtaggttaaatattcgaagagaagatgttacctttttgagaaatgagttaaaaatagaagattcaagacaaagaagaaaagttgttttaattaaagctataaaagatattttaaaagaagaaaaaactataaataaaaatgatataacaagaagattaaacagcattgggtttacagtatcaagatttacagtcatacaatacttaaaagagattcaagattctggtgacctaaaacttgataaagagagtgatgataaaaaagaagaaataatcaataatagagaaaataaagatatagcatttgataaactcataggtagtagtggtagcttaagtacaattataaaactagccaaagcagcaattctttatccacctcatggtcttcatactattattatggggccaactggtgttggaaagagtgagttagcagagtgtatgtataaatttgcagtagaatcatccagattccctaagaatgcaccatttatagtttttaatgcagcagattattcagagaatccacagcttttgctatcacagttatttggacacgttaaaggtgcttttacaggagctgatgagaacaaagaaggattagtatcaaaggcagatggaggaatattgtttatagatgaaatacatagattacctcatgaaggtcaagaaatactatttcaactgattgataaaggtatggtcagaaagttaggagaaacaagactaacacataaaatagatgtaatgattatttcagcaacttctgagccaatagattctcatttacttaatacatttaaaagacgtatacctgtaacaattgaaataccagaattagttgcaagaccattaaatgagaggtttgacattataaataatttcttcttaatagaagctcaaagaatgggagcaaacatacatataaagtcagatgtattaaaagctcttatgctttacgattgtataggtaatgtaggtcaacttagaagtgatattcaagtagcttgtgctaggggactattaaaccaacttacaaacaaactaaaagaagtaaatataagcatatcagatgtacctggatatgtaaaacaaggtcttataaaaatcagaaattgtagaggtaaaatagaaaattatgtagatggggatttaattatagattcaaatcttcaaggtgagatagaaaagaaaaatgaagatatatatacttttccagatgaaatatacaaacttactgaaagaagacatattgatttattggaacaaggtttagattttgatgttataaatagaatcattggaggagaattagaaagttgcattcaaaaatacataaaacaagttaaaaaagtttctattagtaacaatcttccagatataagtccaattgttggaaaatatatcgtagagctaacttatgaagtaatcaaaatagcatcacaatacctaagttcactagaaccgaatctacatttatgtttagcagttcacctaaaagcagcttttgagagattaaaagaaggaaaagtaatatcaaatgctcatttgaaagaaataataggaaattatccactagaatattctgtagcagaaaaggtagctcaatatttaaaggaaagatataatataaacttaccaaaagaagaaataggtataatagcaatatattttaaaatgagtagtagaagagatatgtctgaacaaaaaaagataggtgtacttcttatggctcacggaagagtagcatcttctgtatgtgaggttacaaataaactattaggaattaatcacgcaaggtatttagatatgccatttgagaagaagccggaagaaatgattgaagaagctactacaataataaaagatattgatgaaggtagaggtgtgattatattagtagatatgggttcactttcatattttggagatattatttctggaaagactggaattaatataaggacaatatctagatttgatacattgctttctatagaggttatacgaagagcagttttaccagatttaacaatagacgagatagttgatgaagttaaaggtatagagccacaagtaaaagaaaaggttagtaaatgtaacaatacaaaagtagattttagaaaacctataattttaacattatgtattactggattagggggagcttgtaagataaaaaaaatcctagaggaaaatattaaaagtataactgaaaaggttgatatagaacctataggtatgattgaatatccaagtcttgatttagagataaaacaaataagcaatgataaaaatgtaatcgccatagttggaacaattgaccctcagatagcaaatatccctttttttagtctagtagacataaatgataaagcaaagttaaatcaaataaataacctaattgatacaaatcaaattggtgaaacaaataaaaaatatgaattatcagatttaatacataaagaagatatatttgtggatttacaggttaaatcaaaagaagaagttctaaaatatatgagtaaaaaacttagagagaaaggttatgtgacaaaaaatttctataaaaaagtagtggaaagagataacttatttccaactgaattatcagatgaaatagcaatacctcacacagatggaatagatgtaattaggccagctataagtatagccatcttaaagaagcctattgtgtggagtaaaagtaaagtaaaaataatacttttattagctgtagaccaaaagtgttttaatccattaagcactctactctcatttatagaaacagatgaatttaagaagataaaaaacattaaagatagagattttattagggagatgatattagatggagtcaatgaaaataattagtagcaatttaatttttaaaaatattgaagtgtctaacaatgaagatgcattaaagtttttgggacaacgtttgtttgacgaacagtatgtaaaagaaagctacatacaagctgttgtagcaagagaaaaaaagtatgctacaggattaccaacagaaatatacggagtggcaataccacatacagatatagtacatgtaaatgagccaggaatagcaattggaatactgaataaaccagtaaaatttataatgatgggtacagacgatactgaaattgatgtaaaagttgtatttatgttagcagtgaaagagccacaagaacaattgcaactattagaaaaacttatgactatatttcaagataagaatatactaaataatattgttgacttaagtgaagaaagtgtgagtgatttattaaactctaaattgaaaaattaaacatgtaaagtatattaaaaatgtaaaattaaacatgcaaagtatgttaaaaaatataaaaagattattaaagatttctaactatagatatctttaaaataaaataatttcaatgggggtgactaatgtgactaaaaagatattagttgcatgtggaacaggagtatgtacttcaacaattgctataaacaaattaaagaaagcacttcaagacattggtaaattggatatggttaatattacacaatgtaaagtagtagaagttgcatcaaaagcacctgattatgatttaataatttgtactacacaagtatctagtagtataaaaacaccagtgataaatggattaccttttttaactggtgtcggaatggataaattaatcaatgatgtattagaagagttagaattataattaaaaaaattaaggaacatggtctctaaaatcataagttttagagacttaaaattaaataatggagggtctttatatggagatattaaatttcattgttggtctaggtgcacaagtaatgatgccaataataatatgtatttttggtttgatattaggtacaaaactaggaaaatctttaagagctggtttaactgtgggagttgggtttataggtcttaacactattatagctttgctaacagataatttaggtccagctacacaacaaatggttaagaatttagggctaagtttatcaataatagatgtaggatggccagcagcatcagctatagcttttgcatcaacagtaggggctttaattattccaataggtcttgtggtaaatatagttatgctaattactaatactactcaaactgttgatgtagacatatgggattactggcattttgcttttacaggagctttagtggcaggggctactcaaagtgtaatgtggggagtatttgcagcagtagcaaatatggtaattgtattggtaatggcagatttaactgctccaggtatagaggaatatttaggtatgccaggtatatctcttcctcatggatttacacaggcatttgttccaattgctatagtagtaaataaattattagacctaataccaggtataaataagattgagataaatgctgatacattgcagaaaaaatttggattatttggagaacctttaataatggggtctgtaataggtgtaataattggtattgctgcgaaatatgatataaaaggaatattacaattaggtgtaactatgggagctgtattaatattaattccaaagatggcagcattattaatggaaggattattaccagtatcagaagctgcacaggaatttattgagaagagatttaaaaacagaggcaagatttatataggcttagattcagcagtaggaataggtcatcctgttacattatcagttgcactagtgttggttcctttgactatacttatagcagctatattgccaggaaataaagttttaccatttgcagatttagcagtaattccatttgcacttgtattaatcgtaccaattacaaagggaaatgtgtttagaacattaataataggaataattataattacttctggattattaatcgcaactaacttagctccattatttacccaaatggctttaaatgctagctttaaaatgcctgaaggagcaactatgatttcaagtatttgtgatggtgcgaatccattaagttgggtatttgtaaaagttatgaactataaagttattggaggagtagtttttggagttatagctttaggaatggctatttacaataggaatagaataataaatgaaaataaaaagctatctatagaagaataaggttaaaacaattttattaaggagtgtataggttatgaaaaaatataaatatgattctaaaaggtacttactcagtgttacaataccaggattttttatgattttaatattgatttatgcactgtttaataactatataaattttaatttgaatatatatagtttgttaataattgtctgtacttatggtatattcaatacttttatatcatcaagtaatcctaaaaaaattattattgacagcaaatgtatacattttacctcatttatgactacacataagtatgaaattaaagatatagaaaagataagaataagagaattttataataaaaaaatttatctaaaaattaatgatggagacctttttaaaggtaggtattggataagaacaaatatgtttaataatagtatagcattatatagttatttcattgagttggaagagtgcttatatccagattcactaagatttagaaataaaaaatttgagaataagaatatataaaaataaaaaattgaattgaagcctaacttaatcttttttgataagatataagtttgaactttatactaaatttttagaattttcaatcaagacaataacataatagctaagcaattagaacacaactaagatgtataaggcatgtatatgatgaatgggaggatttaattaatgttattagagaaattaagaaaagaagtattacaagcatctttagaccttttaaactataatttagtgacattaacaggagggaatgtaagtgggagagatgaacaaactggctatatagcaatcaccccaagtggaatggattatagaaatcttacaccaagtgatattgttatagtagatgtagatggaaatattatagatggaaaatggaaagcatcagtggatttatcagaccacttgtatatatataagcatagagaagacataaatagtataattcatacacattctacatactcaagttgttttgctattttaaatgaacctatagaatgcgcaagtacaactcttgcaaatgaagtagggggttcagtaccagttgcaaaattttcaccaccaacatttaaaaagatgggaaaatgtgttattgaagcaattggtgacaaaagagcatgtcttttagcaaatcatggcgtaattgcagttggtccatctgtaggacatgctcttacagccgctgtaatgttagaagattcagcaaaagtatattacttagcaaaatcaattggcacaccagtgctactgcctgatgaagaaattcaaagagcgagagatgtattttttaatgtctatggtcaggataaataaattagataaaattttaaaagtaatatgaaaatatagatattcaatgatattaaggagatttataatgatataataagtttaatagttaagaagtaaaatatgaaatgtaatagtatataaattcatttaagactaaaaataataagataaaataaaaaggagtctgtatttctatgtattacttattaaacaaaagcacaaatccttactttaatttggcattagaagaatatctatttttaaatgataaatataatgatgatattataatcatatggagaaatgaagactccatttttataggtaaaaatcaaaatccatatcaggaagtacatcatgatgttattgaaaagggagaaattcctattttaagaagaatatctggagggggcactgtttatcatgatttaggtaatatcaatatgtcattcatacaaaaagataggcaacttcatgagatagattttttggagcatactaagtttatgcaaaagatgctttcaaccttaggactagatgtatctataactgaaagaaaagatttatttttaaatgggaaaaaaatttcaggctctgcacagtctataaaaagaaaaaattctctttatcatggaactcttctttacgattcagatttaaataaattaactaaatatttaaattcaaataaagcaactgaatcaaatgcaactaaatctgtttcaagtaaagttacaaatattaagtttttactcgaaaaagatataaattactttttagattattgtgttgaatatttaaaatctaatataaagaatataaaagaacttgaattggatgaagaagatattaaaagtgtatacaatataggagaagataaatatagaaagatagagtggacatatggtaaaacgccgaaatttcaagtagtgctaccatttaataatgaaagtaaaataaatatacatgttaacagatggaaagtatcaaaattttttatttcttatgatgataatgtaattaatatggataagttgttagatttgaatttctttaaagaagaaataaaagagagtattttagaaaattatccacattacatagatttaatcaatttaatattttaatataaaacctctaatttgataaaattgtcttatatcaaactagaggtttttaatattcttgcatattaacaaccattacaaaattgtaaaattaaaaacaacactattgaaaaatcaatatatattgtaataaatatatgtgtttttcattagcaaatagacattaactatttatacaactgaaaatttaatatataattaatcagatggttaaaataaaaatattaaaagttttaataaatgatggttaaaaataaaatacgaggtgataccatgtacagtgttataattgttgcagcgggaagcggaaggagaatgaacttagatataaacaaacagttcataaaattaagagaaaaagaaattattgctcatacaattcaagttttttatgaaaatataaatatagatgaaatagtggtatgtataaaaaaagaagaagaggatttttttaaagaaaatataataaataagtataactttaaaaatataaaaatagcatatggcggaaaagaaagacaggactcaatatataatggtttaaaaaaattagatgaaaattgtgatatagtacttatccatgatggagcaagaccatttgtcgaccatagaataatcaacgaatctataaaggtagctaaagaaaaaaaggctgtggttgtaggtgttccagtaagtgatactataaagatagtgtcagatggaacagtacaagaaactccagaaagaaatttgttgtgggcagcacaaacccctcaaacctttgaatataatctcataatagatgcttatgagcaagcatataagaacaattattatggtactgatgattcaatgttggtagaaaatataggtcaaagtgtcactatggtaatgggttcttatgaaaacataaaaataactagtccagaagatttaaatatagcagaacaaatattaaatatggaaaaaagagatgaagttaacagtagaaggagaattatatgagaataggattaggatatgatgtacacaaattaacagagaatagaaaacttataatcggtggtgtagagataccacacgataaaggtttgttgggtcattctgatgctgatgtattgatacatgcaataatggattctattttaggtgctctagcattaggagatattgggaagcatttcccagatacagatgaagaatataagggagcagatagtatgaaattattagaacatgtgtataatctaataacaagtaaaggatataaaattggtaatatagatagtactataattgctcaaagccctaagatggctccatatattgagagtatgagaagtaatatatcaaaagttttaaacacagacattgataatataaacataaaggcaacaacagaagaaggtcttggttttacaggagcaaaacagggaatagcttcacaaagtatttgtttattattgttgacaagtcagaataattaatatattattagtaataagtttaatggatatcaagtaataggcctatatagaatatctataatgtatgaatttaagtgaaattaatataaatataaaattagctatgataaagaaatagtaaaatgatgaaatcttcacagagagaaaacggtggtgagagttttcaagaggaagtctttgaacctgtcttttagcttaaaggtataaaaatctttacggtaggaaccgttatattcccaaaagagagctattcatatagctaactagagtggtaccgcggaaattaaacctttcgtctctatacttgtatagagatgagaggttttttatattttcaggaagttaatattcaggaggaatctattaatgaaaatgtcaaaaatgtttatgccgacattaaaagaaatcccagcagatgctgagattacaagccatcaattaatggttaggtcaggcatgataaaaaaaatgacttcaggtgtttataaccaattaccaatggggttaagagtgttcaaaaaaattgaacaaataattagagaagaattaaataaaaaagattgtcaagaaatactttgtgcagccttacttccttctgaattatggaaagagtctggaaggtggactgctatgggtgaagaaatgtttagactaaaagacagaacagaaagagagtactgtcttgggccaacacatgaagaagcattcactgatataataagacaagaaattacttcatataaacaattgccactgaacttgtaccaaatacaagtaaaatatagagacgagagaagaccaagatttggtgttatgagaactaagacttttacaatgaaggatgcatatagttttgatgtagatgataaaggtttagataagtcatatcaagatatgtttgatgcatatgtaagtatatttgatagatgtggattggagaatagccctgtacaggcagattcaggagctataggaggttctacatcagccgaatttatggttaagtcagaagttggtgaagatgaagttgtattttgtagtggatgtgattatgcagccaatgtagaaagagcagaatcttgtaatctagcatcacaaaaagaagaaatgaaagaattagaagaggttcatacaccaggagcagctacaataaaagagttagaagaatttttaaaaacttctccagataagtttgctaaaactttagtatatgaggcagatggaaaaacagttgtagtcgttgtaagaggagatagagaagttaatgaaatcaaagtatctaatgctataggttctgttatagaatttgctcttgctacagatgatgtagtgagaaaagtaactaatgcagaagtaggatttgcaggtccaataggtataaatgctgactatgtatttatagataaagaaattgttgaacaaagaaacatagttgttggggctaataaaactgagtaccatataaaaaatgctaactatggaagagattttgaaggaatagttggagattttagaaatgttcaagaaggcgaccagtgtatagtatgtggtaagccacttgaaatagctagaggtgttgaagtaggacatatatttaaactaggaactaagtactcagaatctatgaatgcaaacttcatagacaaagatggaaaatcaaagcctatagtaatgggatgttatggaataggtgttgaaagaacagcagcagctataattgaacaacataatgatgagaaaggtataatatggcctttgtcagtagctccataccatgttgtgatagttccagcaaatatgaaaaatgaagaacaaatatcaatagctgaaaatatatataatgatttgcaagctatgggtgtagaagttttattagatgacagagatgaaagaataggtgtcaaattcaatgattcagaattaataggaatacctatgaggattacagtaggtaaaaatattaatgaaggtaaagtagaatttaaacttagacataaagaagataaagagataattgacatagaagaaataaatgaaaaagtaaaggcagagtttatcaggaataatgttaggttaggataataacttaaataagatattgtatagataatcaaagttgtactttatagacaccattttatctatatataaggatataaaatggtgtttttttataaaacaaataaatgaggaggtaattgaaatggcaaaaaatgaaaaacaatttgttgaagaaataacaaagatggaagatgattttccacaatggtacacagatgtaataactaagactgacttagttgattatgcaccagtaaaaggttttatggttgtaaagccatatggatatgcattatgggaaaagatgcaagaatttatggataaaaaatttaaagaaactggacataaaaactgttattttccattattaataccagagagtttattaaacaaagaagcagaacacgttgaaggttttgctccagaagttgcatgggtaacacatggaggaaataaaaaattagaagaaagattatgtgtaagacctacttcagagactataatatgtacaatgtatgcgaaatggttaaaatcatatagagaattaccatatctttataatcaatggtgctcagttgttagatgggaaaaatcaactagacctttcttaagaacatctgagtttttatggcaagaaggtcatacattacatgaaacagcagaagaagcacaagaagaaacaatacaacaattagaagtatataaagcgttatgtgaagaattacttgcaatgccagttgtagctggtcaaaaaagtgaaagtgagaaatttgcaggtggtgaaagaacatatactatagaagctatgatgcatgatggtaaagcattacaatcagggacaagtcacttcctaggtcaacactttactaaggcttttgatattacttttgcagatagagaaggaaatttagctaatccataccatacatcttggggagcatctacaagacttataggtggacttataatgactcatagtgataacagaggtttagtattaccaccaagagtagctccaattcaagttgttatagttcctatagctgctaaaaaaggaaatgtaatggagactgttgataaaatatatgctgatttaaaaactaagggagtagccgtagaagttgatgatagagataactatacaactggatggaaatttaatgagtgggaaatgaaaggtgctccagtaagagttgaaattggaccaaaagatatagaaaataatcaagctatggtatttagaagagatactttagaaaaggattctatgcctttagaaggattagctgatgctatatgtgatttatttgatgttatacacaatgatatgtttgaaaaagcaagaaaacatagagaagacaatacatctatagttgaaaatatggatgagtttagaaaagctttagaagaaaagccaggattcataaagactatgtggtgtggagatgcagaatgtgaagctaagattaaggaagaaacaggagcaactataagatgcttaccttttgaacaagaaaacttaggtcacaagtgtgtgtactgtggaaaagaagcagatagtatggtagtaatggcaaaagcttactaaaatacatttaaataaaaactggggtagaaagtatttaatactttatcccagtttttttgttttttatgagtaataaaatgtatttgtaactatgtcataagataagtcatagatacttatattaaaaagaatataatagagaactatttttaataattacatattaatgaaagcaaaatatttttgttatatagattttcaataaagcaaacaataaatataaatgaatattagtaaggagtgcttttaatttttagaaaataaatgacttaaaagaaagatttatgaaattaaaactaggattttctgatataataaacatgtgtatttttaaataaaaaggatattattattagatttgattaaaaataaacttgcaaaacaatgtactagtttaatattatagttatattgaataaaatatcaggaggaagtaaaaatgaatgtaagagtaaggtttgcaccaagtccaacaggatttgtacatataggtagtttgagaactgctttatataactatttatttgcaaaaaaaatgggtggagaatatatattaagagtggaagatacagaccaaagtagattagtagaaggtgctatagagaatatgcttaatgctatgaaatgggctggtgtcaaccatagtgaaggtgttatattagatgatagtggaaaagtagtacaaaaaggagaatatggtccatatattcaatctcaaagattagatatataccaagaatatataaagcaacttttagatagtggaaaagcttattattgtttctgtacaaaagaaagactggatgaagtaagagatgctcaaagagcagcaggagaaacagctaaatatgatggtcattgtaagaatctttctaaagaagaagtagaagcgaatataaaagcaggaataccatatgttataagattaagattgccagagaatcatacaattaagtttacagacttagttagaggagatatggaatttaatactaatgacctagatgaccaagtattaatgaaaacagatggatttccaacttatcattttgcagtagttgttgatgactatttgatgaaaattacacatgttataagaggagaagaatgggtatcatctactccaaaacatgtttatttatatgaagcttttggatgggaagcacctgtatttgtgcatttaccaaatatacttaataaagaaaagaaaaaattaagtaaaagacaaggtgatgtagctgttgaagactttaagaaaaaaggatatttaccagagggattagtaaactatgtagcattagttggttggtctcctgaagataatcaagaattgtttacaatggaggaattagaaaaagccttctctgtagaaagagtatctaaaagtggtggagtatttgatactgaaaaattaaattgggttaatcagcactatataaaagatggtgatgatgcttatctaacagacttagcaataccatttttagtagaagatggatttataacagaagaagaagctactaataaatatgatttcttaaagagtatgatatcagtacttaaagagaaattacaatatgtaaaagaaattactgaacatgcaagtatattttttggagataaaatagaggtagaaactgaagagggaagagagttcttaagattagaacatatacctactttaatagatgctttgagagaaaaaatagaaaaaacagaggtattaaatgctgagtttgttcaagctatgcttaaagaaatacaaaaagagtacaaaataaaagggaaaaatttatttatgggctcaagaataattttgacagggcaaatgcatggtccagatttaccaaaagtaatggaagttttaggaaaagaaacttgcttaaatagaatagcttatgtaaaaaataatatattatagtcataaaagtccgctaatttagaagcggactttttttgtgttagtatttggtgaaaatatctgcttaagaaaatgaaggtatttaaggtaataaatttaatatataaaaagcaaagcaaaaatataaataaaatatgaataataaactaataaaatattaagcatagaagaagggaatctattattttagtttgatttaattattaagggggtaattactatgtatagtaatattgatgatgttaaaaaggaattaaaggagctatgcttagaatatgttacaattttagaaaaattaaaagatgaaaaaatgattacagaagaaacttttgaaaagtgctcttctcaaaaaaaaatatttttagaagaacaatagaggatggtaatagtattattattatgtagtttgaaagatagtacgaaaaatgatagtaatactattatttattgcaattttcaactataatataatatataatgttaagaagataatttataaaaatacagtgaggtgatgagtgtgaaagtttataatacattgactagaacaaaagaagaatttgttccattagaagaaggaaaggtaaaaatgtatgtgtgtggtccaacagtttataactatatacacataggtaatgcaagaccatttataatatttgatactctaagaaggtatttagagtatagaggatacgatgtaacttatgtacaaaactttacagatgttgatgataagattataaatagaagtcatgaggagggaatatctcctgaagaagttgcggctaagtatataaaagaatattttgtagactgtgatgggctagggataaaaagagctactgttcatcctcaggttacagataatatacaacagattatagagtttataaaagagttggaagataagggatatgcatatgcagtaaatggtgatgtatattttgatacaaataaatttgaaggttatggaaaactttcaggtcaaaaacaagaagatttagaggcaggggctagaattgaggttaatgaccaaaaaagacatcctatggactttgttctttggaaggcaaaaaaagaaggtgagccaggatgggatagcccttggggagaaggtagaccaggatggcatatagaatgttctgttatgtctaagagatatttaggtgaaacaattgatatacatgcaggtgggcaagatttaacattcccacatcatgaaaatgaaatagctcaaagtgaagctagaagtggaaaaatattctcaaaatactggatgcataatggatatataaatataaatgatgaaaagatgagtaaatcaaaaggtaatttctttacagtaagagatatatcaaaattatatgatttagagatagtaagatttttcatgttatcagcacattatagaaatccagtaaactttagtgatgagatgttaaatcaagctaaagcaggtcttgaaagactatataatactaaagaaaaattagaatttacgctaagtaatttagtagaatctcctttaacagaaaaagaagtagagcttgttaaagaattagatgactttagacaaaaattcatagatgctatggatgatgatgttaatacagcagacgcagtaagtgtaatatttgaattagctaagttaataaattctaatgtagatgaaaattcttctttggagtttgctaaaaaatgcttagatgaatttaatgaacttacaggagtattaaatattgtaaataagaaaaaggatactgtattagataaagacattgaagaattgatacaaaaaagaactgatgcaaagaaaaataaagagtttcaattagctgatgatattagacaacaattactagatatgggaattgtattagaagacacaagacaaggtgttaagtggaaaaggatataaaaatggaaaaaactgaattagttactatgtcaccattagttttagcatacttaggtgatacagtgtatgagacatatataagagaatatttaattagacagaatacacaaagaaaagttaatgatttgcataaactagctataaagtatgtaaaagctaaagctcaggcaactataattcatgaaattgaaattgagttaactgaagaagagagtaaaatttataaaaggggaagaaatcaaaagtcaaatacttctcctaagaatgcagatattatagactacaaacatgcaactgggtttgaggcattagtgggatatttgtatttaaataatgaaatagagagacttcaatatattatcaataaaggaatcaaaattattgaaagagatatgtaaatattaaagagtgttgtcttaataataagtaataaggcaacactttttttataactaatgtataataaatatatagaaattagtaatgagaaaggataagaaagttatgaaagtaaaattaatatcacatacacctgaaccagaaaaagtaatagctatggcagctaagctatgttattcaccagttgggacagacgaaatagaaaaagatttctaaaatatattaaagagcattcctataacaaatactatggcggttggaatctatgagaagttatagatatagaattatgtaaattatttggaaaaaacaggtttgaaaattagccatgttggtatttctaggttacttaaggaagatcaaacataaataagctgagttgtcttaggtgcactatgtacaacattagaatgtgaagttgaagatttattacttcaaacgaacgatggtactaagaaaaacaatgatgaaatgattaattaataataaaggtaaggaggtagtatatgagtttagcagataaaatttttattgatatgtgtaataatattcttgaaaatggagtatcatcagatggagaggtagttagagcaaaatgggatgatggccagcctgctcatacaataaagaagttttgtgtagtaaataggtatgatctttcaaaagaattcccaatacttacactaagaccaacaaacttaaaagcagcaatagatgaattactttggatatggcaaaaaaaatctaataatataaatgatttgaatagccgtatttgggatagctgggctgatgaaacaggttcaatagggaaagcttatggataccaaattggacagaaacataaatacaaagaaggagaatttgaccaaatagatagagtgatttatgacttgaaatataatccttatagtaggagaattataactaatatatataatcataatgatttaaatgaaatgaatttatatccttgtgcatatagtatgacatttaatgtaactggaaatagattgaatgcaatattaaatcaaagatcaaatgatattttggtagctaataattggaatgtaactcagtatgcaattttagttcacatgttagcacaaataagtgatttggaagtaggcgaattggttcatgttatagcggatgcacatatatatgatagacatattcctctagttaaagagcttattaatagagaatcttatgatgcaccaaaattaataataaatccaaacataaagaatttctatgactttagagttgaggactttacattagaaaattataaaagtgggccacaaatcaaaaagattcctgtggcaatttagaaggagttatttatgaaagttatagtagctgtagatttaaattggggaattggttatggtggaaagttactacagtcgattcctgaagatatgaaattttttaaagaaaaaactgtaggtaatgtagttgtaatggggagagaaacctttaaatcattaccaggaaaaaaagcattaaaagatagagtgaatatagtcttgactagaagtaaatcttttaatgatgatagattgattgtttgtaattctatagatgaaactcttaaggaactacaaaaatatgaaaatgataaaatttttataataggtggagaaacagtatataaacaatttttaccttattgtaatgaactatatgtaacaaaaatacagaagacatatgaggcggatagatttttccctaatatagatattatgtcaaactgggatttgattaaagaaagtgaagtaaaagaatataacaatataagatatgttttttcaacatatataaataatagtttataggtttgtataggagagaaatttaatttatgaaaaaggatatatttgtaaatagagtttctaatgctttagaaaatgatagaggcgcagtttttgtaggtagtggtatatcgtttagttcgactgaagttgattggtttaaattactggagccattagtaaatgaacttgatataacattagacaataaaagtgatgatttacctatgattgctcagtacatagtaaataattattcaggaaatagagggcctttagtaaacgaaatatcaaaaacatttaatagaaagtttaaactaaacaagtatcataagtatttagcaacaactaaactttcaacaatatggacaactaattatgatatgttgttagaagatgcattttatgattttgatacatcggttaaagtaagtgatgattctattacaaggaatagactagaatatgatgtggaaattataaaaatgcatggatgtatttctagatccgattggaatgaaatagttataactcaagaagattatgatgatttttcaataaataaaccagctatatctcaaagattaagtgaagatttaataaataagtcttttctatttattggatatagctatagagatccaaatataagaaatataatgataaatgctagaaggctaagtaaaaaacatactcaacaacattatataattttaaaaaagttaaaagatagtgatagtaatattacgcaagatgatgtagtaagacaagaactttggtgcaatgatttaaaacgtttgggaatttcaactttatttatagatgaatactcagagttagaggaacttttaagagagataagtcaaaaatcaagaggtaaaacagtatatgtgacaggttctcataaagaaagcaatatgaatgcaagaaaattaggaaccaagctagcaaaacataaagatattactttactaagtggtcaatcatctggtattggctcagaggtagttgctgcgtttactgaagagtgtattaagagtaaagaagatattataaatagaatgaaaatatttcctaatccatattcagctgatgaaaaatactctgatgatattactttaataccagatttaaagaaatgtagaactaaaatgttgaattcaacacaagttgtagttgtatttagtggaggtataggtactgaagcagagatagatgttgctataaaacaaaactgtaatataattcctgttataacatgtaaagaggatagagagaatccagctataaaaaaaatcttaaactatagtgataatatgaaaaatatagaaataaaagatgctacctattataataaaatagtagatgaagatggtgttgtaacaatggaggaaatttatatatgcatatcaaaaataatgaattaaaacatgacattattaaattgaaaaaaagaaatggatttattgaagttggaaaagataaaaaaacgttggtaaactgtttaattggagcgaatgaattagaggattacaaatatgaaataaaaaaaatagattgtatacttaatatatcagaaaaaccagatatagtttcagatttaagtactaaaagaagaaaaataagtgaatctatatggtataagatagttaaagatacacctttcgtatctgctacactgcccatatacttagttagtaaaaataataataaaatagatagtaatgaattattagatataattattgagcagatggaaaatggagttgggatgataacgattcatccaacagcaaataaacaaatttttgaggattctaagaatagaatggtacctgtcacatctagaggtggaggtatggtaatacaagatttaatctcaaaaaatttttcagaagataatgtgtatttgaaaatattgccagaaattataaagtatgctcaaaaacataatgtttgtatcagtctaggtgcaacatttagatcaggaaacatatttgattctaatgatagagcacagataacagaaattaagagtcaaatagaattagctaagaggatatataaaagtaatgtcggggttattattgaatcaccaggtcattcaagaccaagtgacataattaaaatatcgtcaatattaaaaaaagaaggtttcccaattatgccactaggaccaataccaacagatattgcaataggaatggatcatatcgctgcagctattggtgctacaattatgggtatagaaggatgtgcaaatataatatcaactgtcacacgagaagaacatactggagggagaccttctattgaatccacagttgaatctataagaacagcaaaaatagctgctcatattattgatatacatcaaatgaatgatattaacttagatatgagtgtatctaagtctagagctaaatctaacacctgtatatttgggaaagatacaagatattgtgacagatgtagagaactgtgtcctttgtgcattagataaaaattatattcaagttaattcaataaaaaagattggataaaaatacatcgtatagctagtttttcacaacagagtcaaagatatgtcaaattagagcaatttgaatacataattcctccagaaatagaaaaaatagaaaaagcaaaagagttatttataaattcaatgaaaaaataccaagaggattatgataaattagtagagatactatttgaaaatcattataacaaactaataaaaggtggtaaaaacgagaaaacatcaaaaagacaagttgagaagaaagcaatagaagatgctagatacgtatttccaaatgcgtgtgaaacaaagatggtatttactataaatgctagaagtttgtttaatttctttgaacatagatgttatgaaaatgggagttgtctagaaggaactatgacttgtggagatatagttcaagttagaaaaaaatttaagaacttgtaggaggtgaataatttggcgagtatagaaggaagaaatccggtaatagaagcaataaaaagtgacagagaaatagataaaatattaattgcaaattcagctaaagaaggttcaattaagaaaataataggaatggctaaagataagaatataattattcagtatgttgataaacataagctagatgaagtaagtacaagtcattcacatcaaggtgtaatagcttatgcaagtgagtataagtattatgaattagatgagctaatagatttagcaaagaataaagatgaagacccatttttcattatattagatgagataacagacccacataatttgggttcaataataaggacagcagatgcagtaggagcacatggagttatcattccaaaaagaaggtctgtacacataactcctgtagttgccaaagcatctgctggagcagtagaatatatgccagtttgcaaggtaaccaatatagttaatacaataaaaagactcaaagaagaagggctgtggattgctgcagctgatatggatggagaaactttttataaacaaaatcttactggtcctcttggtgtagtaattggaagtgaaggttttggaatatctagattggttaaacaaaactgtgactttatagtaaaaatgccaatgataggtaatgttacatctttaaatgcatctgtagcaggtggaatacttttatatgagatattcagacaaagactggataaaagtaaataggcatgaaaaaaaatataaatcattacttaataatagatggctacaatattataaatgcgtgggacaatttgaaagaactggctaaagaggacttagaagattctcgagaaaagcttattgatgacattatagaattttctgagtttatgggttataagactataatagtttttgatgcttataatgttaaaaattctcgagaaaaagttgaaaaaagaaaacacataacaatagtttatacaagagaacaccaaacagcagatagttatatagagaaatttataacttctttatcaaagtatgatgatgtaaaagtagccactaatgactatgcagaacagcaaatgattttaggaaaaggtgctactagaatgtctgcaagagaattaaagttagagttagatcgttccaagaataaaatgaaggaaaaaaatatcggtttgaggaaaaaaattcagcgaaattggttggaggaaaggttagataaagaaacattgtcgaaacttgagaacattcgtagaaagcgttgaaattactaggttctttagactataatatacctataaatttgttttatatatgggggagatttacatgttggtagcaaaagaaaaaagttatgagttagtggacaattgtcagcaggatgagtataacattgtattaagagcaagtgaaggggataaaatagcactagagtacattattactaaatacagaaattttgtaaaggcaaaagcaaagtcatattttttaattggagcagataaagaagatataatacaagaaggaatgataggcctttataaggcagttagagattttgatggaagtaagaccaattcatttaaatgttttgcggagatatgtataacaagacaaataataactgctataaaaactgcaacaagacaaaaacatatacctttaaattcatatgtttctttgaataaaccaatatatgatgaagagtcagacagaacacttttagatattatagctacaagtatagtaacagatccagaagagcttataattagtaaagaagagttaaaaaatatagaatcaaaaatgaacgaattgttaagtgacttggaattagaagtactagaattatatttaaatggaaagtcataccagtttatagcggacaagcttaaaagagatgtaaagtcaatagataacgctttacaaagggttaagagaaaattagaaaaacatcttgaaaacagaaatgattaatagtaaaatacttaccataagcttattgtgagcaaaattaatttatatcgaaagataagggaggaaattcaaaatggctaaagctaaatacgaaagaacaaaacctcatgttaatatagggacaataggacacgtagaccacggtaaaactacattaacagcagcaataacaaaaacattatatgacagatatcaattaggagaagcagtagatttcgcaaacatagataaagctccagaagaaagagaaagaggaatcacaatatcaacagcacacgttgagtatgaaacaccaaatagacactatgcacacgttgactgcccaggacatgctgactacgttaagaacatgataacaggagcagcacaaatggacggagcaatattagtttgttcagcaacagatggaccaatgccacaaacaagagagcatatactattatcaagacaagttggagtaccatatatagtagtattcttaaacaagtgtgacatggtagatgatgaagagttattagagttagtagagatggaagtaagagatttattaacagaatatgatttcccaggagatgacactccaatagtaagaggttcagcattaatggcattagaagatccaaagagcgagtggggagataagatagtagaattattcgagcaaatagatgagtatataccagctccagagagagatacagataagccattcttaatgccagtagaggatgtattctcaatcacaggaagaggaacagttgcaacaggaagagtggaaagaggagtactaaaagtacaagacgaagtagaattagtaggattaacagaagcaccaagaaaagtagtagtaacaggagtagagatgttcagaaaattattagaccaagcacaagcaggggataatataggagcattattaagaggagtacaaagaaacgagatagaaagaggacaagtactagcaaagactggatcagtaaaggcacacacaaagtttacagcagaagtatatgtacttaaaaaagaagagggtggaagacatacaccattctttgatggatatagaccacaattctatttcagaacaacagacgtaacaggagcttgtaagttaccagaaggaatagagatggtaatgcctggagataacgtaacaatggaagtagacttaataaactcaatagttgtagaagagggattaagattctcaataagagaaggtggaagaacagtagcttcaggagttgttgctacaataatagagtaattctttactaaactgatggattaaaaggaataacaaaaagaggggttaggctcctctttttttaacatagaaatacaaaaacattgacacagcataggattttgtgataacttatacaaggtaatgattataggaagttaataatatcttgaatactgtagatttttaataaatacatattttaaagatattatattcacatatattaacaatatatattattgtattacaaagttggaggtgtatcagatgagagttaaagtaactttagcatgtacagagtgtaagcaaagaaactacaacactactaagaataagaaaaataatccagacagaatagaattacaaaaatattgtagattctgtaaaaagcatacaactcataaagaaacaaaatagttttttataaggatgtgagtatggaatggctgcccaaaaaaatgacggtgcaaaaactaaaaaaaggtttagtttatttggatatttaaaagaaactaagcaagaattaaaaagagttacatggccgacaaaaaaggaactgtttaaaaacacaagtatagttttaactgtagttatttcatgcactatattagtatggggtatagacactatattatctggtgcactagcgttattactaaaatagacgaaaagaggtaagttaaatgtcagaattacaagaagcaagttggtatgtagttcatacctattcgggacatgaaaataaagttaaagctacaattgagaaagcagttaaaacaagaggtatggaagactgcataagacaagtagttgttccaacagaagaggtagtggaaactactaaaactggaaaagaaaaaactagacaacgtaaagtttatccaagttatgtcttggttaaaatgataataactgatgaatcttggtatgtagtaagaaatactaagggagttacaggtttcgttggacctggttcaaaaccagtaccattaagtgaagatgaagtcaaagctatggggatagatacaacagaccctaaagtagtaaatagcgatgttgattttgaaataggagacacagtaaaagtatctcaaggaccatttagtggacaaataggtaacatagaagaaattgacttagaaaatagagaagtcaaagtatgcataaatgcatttggtaaaaggactctatttgtaatagagcttgaaggtatagaaaaaatctaatactatatagaaaaatctgaggaggtgcgctcaaaatggctaaaaaagttataggtcaaataaaattacaaatacctgcaggaaaggctactccagcgccaccagttggaccagcattaggacaacatggtgttaatataatgggattcacaaaagaatttaatgctaaaactgcagatcaagctggaatgataataccagttgttataactgtatatcaagatagatcattcagttttataacaaaaactccaccagctgcagttttaattaaaaaagcattaaacttaaaatcaggttctggagaaccaaacaaaaagaaagttgctaaaatgacttcagctcaagtaagagaaatagctgagttaaaaatgcctgacttaaatgctgcatcagtagaagctgctatgagtatgatagctggtactgctagaagcatgggtgttgtaatcgaagactaattaaaagatacactttttttataaagtgggaggcgagaagccgaaattaaccacaaggaggaaaataaaatggctaaaaaaggtaaaagatatgcaggtgcattacaaaaagtagatagaactaaattttatgatgcatcagaagcattaacattagtttcagatatagctggagctaaatttgatgagacagtagaagcacacattaaattaggtgttgactcaagacatgctgaccaacaagtaagaggtgcagttgtattacctcatggaactggtaaaacaaaaagagttttagtttttgctaaaggtgaaaaagctaaagaagctgaacaagctggtgctgactttgtaggagctgaagaattagttcaaaaaatacaaggtgaaaactggtttgactttgatatagtagttgctactccagatatgatgggtgtagtaggtagattaggtagagtattaggacctaaaggtttaatgccaaaccctaaatcaggaacagttacatttgatgtagctaaagctatagatgaaataaaagctggtaaagttgaatacagattagacaaaactaacataatacacgttccagtaggaaaagtatcatttggtggagaaaaattaactgaaaactttactgcattaatggatgctataataaaagctaaaccagctgctgctaaaggacaatatttaagaagtataacagtagcttcttcaatgggacctggagttaaaataaacccagcaagaacagctgaataataaaactgttgacacaggttgacaaaaatgttattatatcacttgtcaatgtaaaaaagaatagatttgccgtagatagtgggtgcgaaagcttaatatcccgccgaggttttagataaattgagattactaaagcttttgatgtctacttttggcaacaaaagctttttataatgttgcggtaaatattaagcctatttggtgaaggaggtgcacatctatatgagaaaagctatagaaattaaatcagaagttgtttctgagatagttgaaaagttacaaaaatcttctgctgctgttgttgtagattacaaaggattaacagttgaagaagtaactgagttaagaaaacaaatgagagaagctggtgtagattacaaagtatacaaaaatactttagttagaagagcagctaaagaagttggtatagagcaatttaatgatgaattattagttggaactaatgccatagcatttggatatgatgatccagttgctccagctagaatattaaaaggattcatggattctcatccaaaaatgaaattaaagatgggtattgtggaaggtgcattctatgatgaatctaagattgttgaaatggctaacataccatcaagagaagttcttatcgctaaattacttggtagcttaaaagctccagtatcaaacttcgcatacttaatagatgcaatagcgaaaaaggcagaaggtcaagaagaagcttaattgcttaactaaaaaattataaatattaatttgaaataaaattcggaggtgctaaaaatgacaatagaacaaatattagaagctatagaaaatatgaaagttttagaattaaatgaattagttaaagctgctgaagaaaaattcggtgtatcagcttcagctccagtaatggtagctggtgcagctgctggtggaccagctgctgaagaaaaaactgagtttgatgtagtattaactgacgttggttcttcaaaagttggagttataaaagcagttagagaaataacaggattaggattaaaagaagctaaagaagtagttgacaatgctcctaagacagttaaagaaggagcttctaaagaagaagctgatcaaataaaagagaaattagaagctgctggagctaaagtagaagttaagtagtttctttaaaaagatacccattgggtatctttttttatttataaaaaactataaagaaagtatttggaattataaagaaagtgtttttataaaataaaaaaaatttatataatagtactaaattaagggtatcatatatggtgtaatggtattttaatttaacattattatcaaattaaaatataaacaattgttgtaatgtctgtatataaagtatataattaaactaaaatgtaaaattttacattttagtttaaaaaaatacacgagtgttttataaataaaatgtaataaataattaattaacaaatataaattttaaaataagttagatatttagaaaaatcgaaatttgtaggatttaaaggacatattcaaggaggagttaataatggaaaaattacaaggaaaaattgcagtagttactgcagcaacaaaaggtattggattagcatcagcagagatattagcaaaaaatggagcaactgtgtacttagcagctcgttcagaagaattagctaatgaagttataaataaaataagtgcagaaggtggttgtgctaagtttgtttactttaatgctcgtgaagaagagacctttacctcaatgatagaagaggtagttaaaaaagaaggtaagatagatatacttgtaaacaattttggttcaacaaacccttctcttgacaaagaccttgtaactggggatacagataatttctttgacacagtaaatactaatttaaaaagtgtgtatttaccatgtaaagcagcaattcctcatatgataaagaatggaaaaggaagtatagtaaatatatcaagtataggttcagtattacctgatttatctagaatagcttactgtgtatcaaaagcagcaatcaactcattaactcaaaacatagctacacaatatgctaaagacaatgttagatgtaatgctgtacttccagggcttattgcaactaaagcagcattagacaatatgtctccagagttcataaaagaatttttaaagcatgttcctttaaatcgtataggggaaccagatgatatagcaaaagctgttctattctatgctagtgatgactcatcatttataacaggggatttacttgaagttgcaggaggatttggtttacctactccacaatttgcagataatatattaggataattaaattactaatatgcaatgaaagcttatgcattagttatagtagaaatgatatttttataaaggccatagatataatttatattggaaaggtttgaggttcaaaattccaagttaaatttatttatggtctttattttgtatattttaataaattgtatatatttgtataaatgtaattatttacaatcattttaatatggaattataattaaataggggggatggtacttgtataaaattttttatagaaaattagacctataaatgaaaaatatggattttatattggaaaattgtacataatacataatatatgcttaaaataatttacaaaaaatcaaaaataatgcatagtttacatataagataaaaaatatattgaaaaatacttgacattatgctaaaattattagatgcgttagaatgaactattgttttatttttaattattgagaggtgaaaagtgaatgccacatcctgtcacgataggtaaaagaactagaatgagcttttctaaaattaaggaaatagctgatgtgccaaatcttatagaaattcaagtagattcctatgagtggtttttaaaagaaggtttaaaagaagtgtttgatgatatttcaccaatagaagattatactggtaatcttatattggaatttgtcgactattctctagatgataaaccaaagtacgatatagaagagtgtaaagagagagatgctacatattgtgcacctctaaaggttaaggtaagacttataaataaagaaacaggtgagataaaagaacaagaagtgtttatgggtgacttccctttaatgacagaaagaggaactttcgttataaatggagcagaaagagttatagtaagtcaattagttagatctcctggtgtttactatgcggaagaaagagataaaacaggtaagagattgatttcatctactgtaattcctaatagaggagcatggttagaatatgaaacagattctaatgatgtaatatctgtaagagttgatagaacaagaaaacaaccagttacagttttacttagagctttaggaataggaacagatgcagagataattgaccttttaggagaagatgagagattatctgctacattagaaaaagataatactaagacagtagaagaaggtcttgtagagatatacaaaaaattaagaccaggtgaacctcctactgtagaaagtgcatcatctttattaaatgctttattctttgacccaaaaagatatgacctagcaaaagttggtagatataaattcaataagaaacttgctttatgttatagaataatgaataaaatttcagcagaagacataataaatccagaaactggagaagtatttgtaaaagctggagaaaaaataagctatgatttggctaaagccatacaaaatgcaggtataaatgtagtaaatctactaatggatgatgataaaaaagttagagttataggaaataattttgtggatattaagtctcacattgattttgacatagatgatttaaacataaaagaaaaagtacattatccaactttaaaagaaattttagatggatatagtgatgaagaagaaataaaagaggctataaaatcaagaattaaagaacttataccaaaacatatattattagatgatataatagcttcaataagttatgagttcaatatattctataatataggaaatattgatgatatagatcacctaggaaacagaagaataagatctgtaggtgaattgttacaaaatcaagttagaattggtctttcaagaatggaaagagttataaaagaaagaatgacggttcaagatatggaagctataacgcctcaagcgttagttaacataagaccagtttcagctgcaataaaagaattttttggtagttctcagttatctcagttcatggatcaaacaaatcctctatctgagttaacgcataagagaagattatcagcccttgggcctggaggtctttcaagagaaagagctggattcgaagtgcgtgacgttcaccattcacactatggtagaatgtgtccaatagagactccagagggaccaaatatcggtcttataaactctctaggaacttatgcaaaaataaatgaatttggatttatagaatcaccatatagaaaatttgataaagaaacatcaacagttactgatgaaatacattatttaactgctgacgaagaagatttattcgtaagagctcaggcaaatgagccattaacagaagatggtaaattcgtaaaccatagagttgtttgtagaactgtaaatggtgctgttgaaatggttcctgaaagtagagtagattacatggatatatctcctaagcaggttgtatctgttgccactgctatgatacctttcttagaaaatgatgatgccaaccgtgcccttatgggagcgaacatgcagcgtcaggcagtgcctctagttagaagagaagcaccaattataggaactggtatagaatacagagcagcaaaagactctggagcagttgttgttgctagaaattctggtatagcagaaagagtaacagcagatgaaataattataaaaagagaagatggaaacagagatagatataatctacttaagtttaaacgttcaaactcaggtacttgtataaatcaaacacctataataaataagggtgaccagataataaaaggtgatgttatagcagatggtccagcaactgatttaggagaagttgcacttggaagaaactgtcttatagcattcatgacttgggaaggttataactacgaggatgctatattaataaatgaaagattagttaaagaagatagattatcaacaattcatatagaagaatatgaatgtgaagctagagatacaaaactagggccagaggaaataactagagatatacctaatgttggagatagtgcaatcaaaaacttagatgatagaggtataataagaataggtgcagaagtagactcaggtgatatattagttggtaaggtaactccaaaaggagaaactgaacttactgctgaggaaagattacttcgtgcgatattcggagaaaaagccagggaagttagagatacttcacttaaagtacctcatggtgaatctggtataatagttgatgtaaaagtatttactagagaaaatggagatgatttatctccaggagtaaatgaattagtaagatgttatatagctaaaaagagaaagataaaagttggagataagatggctggtcgtcatggtaataaaggggttatctcgagagtattacctgaagaagatatgccattcatggaaaatggaacgccattagatataatacttaacccacaaggtataccatcacgtatgaacatcggtcaggttctagaagttcatttaggacttgctgctaagacattaggatggtatgtagcaacatcagtattcgatggtgctaatgagtatgacataatggatgctcttgaagaagctggatatcctagagatggtaaattaactttatatgatggtagaacaggtcaatcttttgacaatagaataactgttggatatatgtattacttgaaactacatcacttagtagatgaaaaactacatgcaagaagtactggaccatactcattagttactcaacagccactaggtggtaaagcacaatttggtggacaaagatttggagagatggaggtttgggctctagaagcatatggagcggctcacatacttcaagagatacttactgttaagtctgatgatgttgtaggtcgtgttagaacttatgaagctatagttaaaggtgaaaacatacctgagccaggaatcccagaatcatttaaggttcttataaaggaacttcaaagtttatgcttagatgtaaaagtattgacagatgaagaccaagaaatagaagtaagagaatctgtagatgaagatgatacgataggtgaatttgagctagacgttgtaaatcacatgggagaagttgaagaaagtaatataatagaagaaattgaagatgattttgtggaagccacagaagatgaggatatagagaatttagaagaattcactgaagatgatttatttgaagaagaaatagattttgaaagtgatgactttgatatgtaaatttaattaatgtaaatctcaaatagaagggagagaactccttgtttgaattaaacaatttcgagtcgataaaaatagcattggcttctccagaaaaaataagacaatggtctagaggagaagttaaaaagccagaaactataaattaccgtactttaaagccagaaaaagatggtcttttctgtgaaaggatatttggaccacaaaaagactgggagtgtcattgtggtaaatatagaagagttagatataaaggtgtagtttgtgatagatgtggagtagaagtaactaaatcaaaagtaagaagagagagaatgggacatatagagctagctgctcctatgtctcacatctggtacttcaaaggtataccaagtagaatgggacttttacttgatatgtcaccaagatcgttagaaaaaatactatatttcgcctcatatgtagtagttgatccaggtgaaactggattgaatgaaaaacagttacttacagaaaaagaatacagaactgctcttgaaaagtatggatatacttttactgtgggtatgggtgctgaagctgtaaaaacattactacaaaatatagatttagaacaacaaagtaaagacttaagagcggaattaaaagatagtacaggacaaaagaaagtaagaacaattagaagattagaagttgtagaagcatttaaaaaatctggaaataaaccagaatggatgattttagatgcaataccagtaataccgccagatttaagaccaatggtacaacttgatggtggaagatttgcaacttcagacctaaatgatttatacagaagagttataaatagaaataatagacttaaaagactattagagcttggagctccagatataattgtaagaaatgaaaaaagaatgcttcaagaagctgttgatgcattgatagataatggtagaagaggtagacctgtaacaggacctggaaatagaccacttaaatctttatcagatatgttaaaaggtaagcaaggtcgtttccgtcaaaacttacttggtaagcgtgttgactactcaggacgttctgttatagttgttggaccagaacttaaattttatcaatgtggacttccaaagaagatggcattagaattattcaagccatttgttatggataaattagttaaagaaggttatgcacataatataaaaagtgcgaaatctatagtagaaaaagttaagccagaagtttgggatgttttagaagatgttataaaaagtcatccagttcttcttaaccgtgcaccgactctacatagattaggtatacaagcatttgaaccaatcttagttgaaggtaaggctataaaactacatcctcttgtatgtacagcttataatgcagactttgatggtgaccaaatggcagtccatgtacctttatcagtagaagcacaagcagaagcaagattcttaatgctttctgtaaataatatacttgctcctaaagatggttcacctataactactccatctcaggatatggttttaggttgctattatctaacaatagaagcccaagatggagctaaaggaacaggtatggtatttaaagactttaatgaactattacttgcttattacaataaatcagttcatctacatgcattagtgaaactgaaggtaacacttgaagatggaagaagttcattggttgaaagtactgttggtagatttatatttaatgaaaatatacctcaagacttaggttttgtagatagaaaagaaaatccatttgcacttgaagttgatttcttagcagataaaaaatctcttggtaaaataatagataaatgctttagaaaacacggaaatacagaaacagctgaattactagattatataaaagctctaggatttaaatattctacattaggtggtataacagttgctgttgatgatatgagtgtcccagaagaaaagaaagtatttatagctgaggcagaagctaaagttgataagtatgaaaaagcatacagaagaggtctaatctctgatgaagaaagatatgaaaaagttatagagacatggacagaaacaactgataaagttactgatgctcttatgggtggactagatagattaaataatatatatataatggcacattcaggagccagaggttctaaaaaccaaattagacagctggcaggtatgcgtggtcttatggcaaatgcatctggtaaaacagtcgagataccagttaaatctaatttccgtgaaggtttatcagtactagaatactttacatcttcacatggtgccagaaaaggtcttgccgatacagctatacgtacagctgaatctggatatttaacaagaagacttgttgatgtaagtcaagatgttattgtaagggaaatagattgtggaacagaagatactacagagatttatgctataaaagaaggaaatgaagttatagaagagatatatgatagaattgtaggaagatatactatagaccctatattaaatcctgaaactggagaagttctagttgaggctgattcaatgatacaagaagatgaagcagaaactatagtagctttagggattgaaaaaattaggataagaacagttcttaactgtaaaactaatcatggagtttgttctaagtgttatggtagaaacttggcaacaggaaaagaagttaatataggtgaagcagttggtataatagcagctcaatctatcggtgagccgggtactcagcttacaatgcgtacattccatactggaggagttgcaggagctgatataactcaaggtctaccaagggttgaagaattatttgaagctagaaaaccaaaaggattagctgtaataactgaagtatctggtagagttgaaattgatgaaacaggaaagagaaaagaagtaaatgtaataccagaagaaggcgagactcaaacatatgtaattccatatggttctagattaaaagttaagcaaggtcaaatgctagaggctggagaccctctaacacaaggatttataaatcctcatgatatagtaagagtaaatggtgttaagggagttcaagaatatatagttaaagaagttcaaagagtgtatagacttcaaggggttgatgttaatgataagcatatagaagttatagtaagacaaatgctatctaaagtaaaagttgaagacccaggagatacagatttattgccaggtggatatgaagatgtattaacattcaatgaatgtaataaagatgctatagataaaggtctaagaccagcagttgctaaaagagttttacttggtataactaaagcatctcttgcaactgattcattcttatcagcagcttctttccaagaaacaacaagagtattaacagaggcagcaataaaaggtaaagaagaccacttaataggacttaaagaaaatgttatattaggtaagttaataccagcaggaacaggaatgaagaaatatagaaatatagctgttgaaaaaattgaagattaatagcatatagagtaaagaaatcttgacaaccattatttgtggtgttaaaatagtaaagtgtgttgtttaaaagtacactaagggcttgaacaagttcttagtgacttttagatggcaataaatgagaactaaaaagcatcaagctagaaaagtgctaatatcacatatttatgtgttatagacattaaattgtaagtaacgaatgttacaatcagtcagtatgaatattcatattgatgtagttggcggtcactgataagatcgaaaatttggaaggaggtgcagatgatgccaacaattaaccaattagttcgtaaaagtagaaaagcgctagagaagaaatctactgctccagcattacaaaaaggttacaactctttaaataagaaagtaactgacgctagtgccccacaaaaaagaggggtttgtacttcagtaaaaacagttactcctaagaagcctaactcagctttaagaaaagttgccagagttagattaactaatggtatagaagtttctgcttatataccaggagaaggacacaacttacaagagcatagtgttgttcttataagaggaggaagagtaaaagaccttccaggggttagataccatatactaagaggtactctagatacagcaggtgttgataagagaagacaatcaagatctaaatacggtgcgaagagacctaaagaagctaaaaaataaaacaattaatgattgattatagttcggtgctttaaatatatatatatttacggcatcacggcattaaatgatttatgtcgagtacctatgatttaagttaaataattaaggagggaagcgaaatgccaagaaaaggtaatattccaaaaagagaagttttaccagatcctatgtatgggagtaaggtagttactaaattaataaataatctaatggtagacggaaaaaaaggaaagtctcaaagaatagtttatgatgctttcgcaattgttgctgaaaagacaggagaagaagctttagaagtatttaataaagcaatggataatataatgcctgttttagaagtaaaagcaagaagagttggtggggcaaattaccaagtgccaatcgaagttagacctgaaagaagacaaacattaggtttaagatggctagtaaaatatactagagctcgtggagaaaaaggaatggttgaaaagctagctaaagagataatggacgcagctaacaacactggagcttcagttaagaaaaaagaagatactcataaaatggcagaagctaataaagcatttgctcattacagatggtaggatatatagatatcttataaattcaaggatatcataaggaggataaccatggctagaaagtttcctttggaaaaaactaggaatataggaatcatggctcatatagatgcaggaaagactactactacagaaagaatcctgttttatactgggcaaactcataaaataggagaaactcatgaaggagcttctcaaatggactggatggagcaagaaaaggaaagaggtataacaataacttctgccgctactactgcttcatggaaagaccatagaataaacataatagatactcctggacacgtggacttcacagttgaggttgaaagatctctaagagttcttgatggttcagttgctgtattctgtgcaaaaggtggggttgagcctcaatctgaaaatgtatggagacaagctgaaacttatggagtacctagaatagcttttataaacaaaatggatatattaggtgcagatttctacaatgttataagcatgatgaaatctagattaaattctaatgcagttcctatgcaattaccaataggtaaagaagattcatttataggtataatagacttattaaaaatggatgctgttatatacaaagacgacctaggggttgaaatggaagaaacagatataccagaagatatgaaagaattagctgctgagtggagagaaaaattagttgaatcagtagctgaaactgatgaagaattaatgatgaaataccttgaaggtgaagaacttactatagatgaattaaaagttgctataagaaaagctactatagcttgtgaaatgaacccagttttctgtggtacagcttatagaaacaaaggtgttcagttagtaatagatgcagttttagattacttaccagcaccaactgatataccagctataaaaggtatattagcagatggagaagaagctgaaagacattcttctgatgaagagccattctctgcattagcattcaaaataatgactgacccattcgttggaaaactagcgttcttcagagtttattctggaacattagaatcaggttcttatgttttaaatgcaactaagaataagagagaaagaattggtcgtatattacaaatgcatgctaatacaagagaagaaataactaaagtgtatgctggagatatagcagcagcagtaggattaaaagatactactactggagacacattatgtgaccctgctaatccaataatacttgaatctatggaattccctgagccagttatatctgttgctatagaaccaagttctaaagcagctcaagaaaaaatgggtatagctcttcaaaaattagctgaagaagacccaactttcacagttaagactgaccaagaaacaggacaaactataatatctggtatgggtgaattacacttagagataatagtagatagattattaagagaatttaaagtagaagctaaagttggtgcaccacaagttgcatatagagagactataactcaaccagttgatgttgaatacaagtactctaagcaatcaggtggtagaggacaatacggtcacgttaagattagagttgctcctcaagagccaggtgaaggatacaagttcacaaacaaaactgttggtggatcagtaccaaaagaatatgttggtccagttgacatgggtatacaaggagctatgcaatctggtatagttgctggatatccagttgtagacgttgctgttgagttatatgatggttcttaccatgaggttgactcttctgagatggcgtttaagatggctggttcaatggcattcaaagatgctatgaagaaaggtaatgcagttcttttagagccttacttcaaagtagaagttgttactccagaagattacatgggagatgttatgggtgacttaaactcaagaagaggattaatccaaggtatggaagctagaagtggtgcacaagttataaatgcattcgttccactttcagaaatgtttggatactcaacagacctaagatcttcaactcaaggtcgtgcaacttacacaatgatattcgatcactatgagcaagttccagcttcagttgctaagaaaatagctgaaggaaaataatttaaaaataattaataatataaatataaaaaataatcagctagatgagatatatctcatctagcacaagataaagggaggaaattcaaaatggctaaagctaaatacgaaagaacaaaacctcatgttaatatagggacaataggacacgtagaccacggtaaaactacattaacagcagcaataacaaaaacattatatgacagatatcaattaggagaagcagtagatttcgcaaacatagataaagctccagaagaaagagaaagaggaatcacaatatcaacagcacacgttgagtatgaaacaccaaatagacactatgcacacgttgactgcccaggacatgctgactacgttaagaacatgataacaggagcagcacaaatggacggagcaatattagtttgttcagcaacagatggaccaatgccacaaacaagagagcatatactattatcaagacaagttggagtaccatatatagtagtattcttaaacaagtgtgacatggtagatgatgaagagttattagagttagtagagatggaagtaagagatttattaacagaatatgatttcccaggagatgacactccaatagtaagaggttcagcattaatggcattagaagatccaaagagcgagtggggagataagatagtagaattattcgagcaaatagatgagtatataccagctccagagagagatacagataagccattcttaatgccagtagaggatgtattctcaatcacaggaagaggaacagttgcaacaggaagagtggaaagaggagtactaaaagtacaagacgaagtagaattagtaggattaacagaagcaccaagaaaagtagtagtaacaggagtagagatgttcagaaaattattagaccaagcacaagcaggggataatataggagcattattaagaggagtacaaagaaacgagatagaaagaggacaagtactagcaaagactggatcagtaaaggcacacacaaagtttacagcagaagtatatgtacttaaaaaagaagagggtggaagacatacaccattctttgatggatatagaccacaattctatttcagaacaacagacgtaacaggagcttgtaagttaccagaaggaatagagatggtaatgcctggagataacgtaacaatggaagtagacttaataaactcaatagttgtagaagagggattaagattctcaataagagaaggtggaagaacagtagcttcaggagttgttgctacaataatagagtaattctttactaaactaatggatttaatataaaaaaaagaggggggtaactcctctcttttttgttttttgttgacaagtagcgctaaagcatatatactaaactagtgccttgagacagattaacaatcaagtttaaggttatgatgttgtaatagaaaataaaattgaaaaaaacagaaaaaaaacttgaaaaaatgtaacagatgatataaaatataatagtgtgcttgagagattaagaaaataataattaaatcctagtgaaatacgaactgatatcgatttaaaagttacaacacacccggagcagtgtatcggtattggttgtacgcaacttgaaaattaaacacgtgataaaggagggaaaacaaaatggctaagaatgaaaaaataagaataagattaaaatcatatgatcacaaattattagatttttcagcaggtaaaatagttgaaactgctaaaaaggctggatcacaagtttcaggacctgtgcctctaccaacagaaaaacaagttgtaactatattaagagctgtacataagtacaaagactctagagaacaatttgaaataagaactcataaaagactaatcgacatagctaatccaacacctaagacagttgactcattaatgagattagacttaccagcaggtgtagatatagaaataaaattataagaacccctaagatattatcctatagatgattatcttagaatgattactctaaaagatgtaatccgctgtaagaattataggaggtgctaatatgaaaggaatattaggcaaaaaagttggtatgactcaaatattcactgataaaggtgtagttatacctgtaacagctgttgaagcagggcctatggtcgttactcaaataaaaacagttgataaagatggatacaatgctatacaaataggttttgaagatgctaaagaaaaagctttaaacaaacctaaaaaaggacatttagctgctgctaatgttttaaagaaacatttaaaagaatttagagtagattctgtagaaggatacacagtaggacaagaaataaaagctgatgtatttgaagcaggtgcaaaaatagatgttactggaataagtaaaggtaagggattccaaggtccaataaaaagacatggacaaagtagaggtcctgaaactcatggttctagataccacagaagaccaggttcaatgggagcttgttcttacccaggtagagtatttaaaaacaaaaaattagctggacatatgggaagcgtaaaggtaacagttcaaaacttagaggttgttaaagtagatgctgacaagaaccttatattagttaaaggagctataccaggagctaaaggttcagtagtaactataaaagaagctataaaggtttctaaataatgactaacctagagaaaggaggaataacaatgccaaaattaaatgtactaaatgttagtggacaaaacgttggagaaatagaattatcagattctatatttggcgtagaagttaatggacatgttttatacgaagttgtaaaaaatcaattagcaaataagagacaaggaactcaatctgctaaaactagagcagaagttagaggtggcggaagaaaaccttggaaacaaaaaggaacaggtagagcaagacaaggttctacaagatctgtacaatgggtaggtggaggagttgcttttgcacctaaaccaagaagctacaaatatacattacctaagaaggtaagaagattagctatgaagagtgctttatcttcaaaagttcaaaatagtgaagttatagtattagatgcattaaacatggatgctcctaagactaaagaatttgctcaaatattaaacaatataaatgctgctaaaaaagctttagtagttatagctgacaaaaacgataacgtaataaaatcagctagaaatatagaaggtgttcaaactgcattagttaatactatgaatgtatatgatatattaaaatacgattcatttataataactacagatgctgttaaaaaagtggaggaggtgtacgcataatgactaatccacatgatgtaataataagaccagttgtaactgagcacagtatggctgaaatgggtgaaaaaaaatacacttttgttgtggctaaagatgcgaacaaaactgaaataaaaaaagcagtagaaaaagtattcggagttagtgttgataaagtaaatactttaaactacgatggaaaagttaaaagaatgggtagaactcaaggaagaacagcaagctttaagaaagcagtagttaaattaactgctgatagtaaagaaatagaattcttccaaggaatgtagtattataacaaacgaaggagggaaaacagatggctataaaaaagtttagaccaacttctcctgccttaagacaaatgacagttttagtttctgatgaaataacatgtaatcaaccagaaaaatctcttttagttaacttaaagaaaaatgctggtagaaacgtacatggtagaataactgttcgtcatagaggtggaggacaaaaaagaaaatatagaataatagattttaaaagagataaagatggtatacctgctaaggttgctactatagaatatgatccaaacagaactgcaaatatcgcattattaaactatgctgatggagaaaaaagatatatattagctccagttggaattaacgttggagatactatattatcaggattaggtgctgatataaaaccaggaaactgtttagcattaaaagatatgccagttggtactatcattcataatatagaattaaagccaggaaaaggagctcaattagttagatctgctggagtttctgcacaattaatggctaaagaaggaaaaaatgctttattaagattaccatcaggtgagatgagattagtaagcataaactgtaaagctactataggtcaagttggaaatatagagcatggtaacgtagttatcggtaaagcaggtagaaaaagacatatgggaataagacctactgtaagaggttctgtaatgaaccctaatgaccatccacacggtggaggggaaggtagatctccaataggtagaccatctcctgttactccatggggtaaaccagctcttggatacaaaactagaaagaaaaataaagcttcaaataaactaatagtatcaagaagaactaagtagtaaatttatttttgctcggaaaggaggaatataaatgtcaagatcaactaaaaaagggccttttgtccatgcaagacttttaaagaagatagaagctatgaatgctagtggaaataaagaagttataaaaacttggtcaagatcttcaactgtatttccacaaatggtagaaaacactatagctgttcatgatggaagaaaacatgttccagtatatataacagaagatatggttggacataaattaggtgagttcgttcctactagaactttcaaaggacataaggatgacgaaaaatctaataagagaaaataattaaattatgactaagaaaggaggaataacaatggaagcaaaagctactgctaaatacgtacgtgtatcaccaagaaaagcaggccaaatatgtgaccttgttagaggaaagaatgttgatgaagcattagcaatattaaagtttactccaagaggagcagcttcaataatagctaaggttgtaaaatcagctaaagctaacgcagaaaacaatcacgaaatggatactgaaaaattatatatagcatcaatagttgctaatcaaggaccaacaatgaagagattcatgcctagagctatgggtcgtgcaactacaataagaaaaagaacttctcatatagaggttgttgttaaagaaaaaaaataattaatagataggagggaaagtaatgggtcaaaaggttaatccacacggcttaagggtcggtgttataaaagattgggactcaagatggttcgctactgataaaaaagagttcggaaacttattattagaagaccataatatacgtaaattcttaaagaaaagattatactcagctggagttgctaagatagaaatagaaagatcagctaacaaaataaaaatggacttacacgttgctaagcctggtgtagttataggaagagctggtgcaggaatcgaagcattaaaagctgaattagaaaaaatgacaaagaaaactataatagttaatatagtagaagtaagaagtacagataaaaatgctcaattagtagctgaaaatatagctttagctatagagagaagggttgctttcagaagagcaatgaaacaagctatacaaagagcaatgaaatctggtgctaaagggataaaagtttctgcttcaggaagattaggtggagctgaaatggctagaactgaaggttatagtgaaggaaatgtgccactacaaactttaagagcagatatagattatggtttcgctgaagctgatacaacttatggaaaaatcggtataaaagtttggatatgtaatggtgaagttttaccaactagagacggtgtaaatccaagagaagaaagcagaaagagcgatagaagagacaacaagagagataatagaagaaacgatagaagaggaaatgacagaagaggaaatgataacagaggaaactacagaggacaaagacctcaaggtggatcaagacctcaaagaactgaaaacaaaggaaattaataatagttaggttcaaggaaggaggaaaaatactcatgttaatgccaaaaagagtaaagcgtcgtagagttcatagaggaagcatggctgggcaagctcataagggtaataaagttacttatggtgagtttggattagtagcattagaagcttcttggataacttctaatcaaatagaagctgccagaatcgcgatgactagatatataaaaagagggggaaaggtttggataaaaatattccctcataaaccagtaacaagaaaaccagcagagactcgtatgggtgcagggaaaggttctccagaatattgggtagctgtagttaagccaggaagagttatgtttgaattagcaggtgtttctgaagataaagcaagagaagctatgagacttgctgcacataaattaccaatcaaatgtaaatttgttaaaaaagaagatttagaagtaaagggtggtgaataggatgaaagctaaagaattaagagatttaacaagcgaagagctaatgaacaaattaaacgacttcaaaagtgaattatttagcttaagattccaattagctactggtcaattagaaaatacagctagaataaagtttgttaagaaggatatagcaaaagttaaaactgttcttgctgaaagaaagttatacgaaactagagcttaatttggaaaggaggctttttaaacatggaaagaggaagaagaaaagttagaataggccgtgttgttagtgataagatggataaaacaatagtagtagctgttgaagaattcgtacgtcatccactatataataaacgtgttaagagaactaagaaattcaaggctcatgatgaaaagaatatatgtaacatcggagatagagttaaaataatggaaactagaccattatctaaagataagagattcagactagttgaagttgttgagaaagttaagtagtttttgaagaaggagggattacgatatgatacaacaagaatcacgtctaagagttgctgataactcaggagctaaagaacttttatgtatacgtgttctaggcggaagtaaaagaagatatggtaacataggcgacgttatagttgctactgttaaaagtgcaacacctggtggagttgtaaaaaaaggtaaggttgttaaagctgttatagtaagaagcaaacaaggcgtaagacgtaatgacggaagctatatatcttttgatgaaaatgctgctgttataataaaggacgataaaactccagtaggaactcgtatattcgggcctgttgctagagagttaagagacaatgaattcatgaaaatagtttctcttgctccagaagtactataattaaggaggtgcaataggacatgatgcgtgttaaaaaaggtgacactgttgtagttatagcaggtaaagataaaggtaaaaaaggttcagttttaaaggtatatcctaaaactagcaaagtgttagttgaaggtgtaaatgtaataactaaacatcaaaaaccaagtgctatgaaccaacaaggtggaataataaataaagaagccccaatacacatatctaatgtaatgccatttgatcctgaaacaggaaaaggcgttagagtaagatatgaagtaaaagatgggaacaaagtaagagtatcagcaaagagcggaaaagaattataataaatattgcttgaaaggagggaccttaaatggcttctagattacaagaaaaatacatgaaagaagttgctcctgctttaatggagaaatttggatacaaaaacgtaatggagatacctaagttaaataaaatagttattaacatgggtataggtgacgctagagaaaatccaaaaggattagaaaaaggcgttgaagaattagaaatgatatcaggacaaaagcctgttataactaaagctagaaaatctgttgctaacttcaaattaagagaaggaatgccaataggaacaaaagttacattaagagctgacaaaatgttctactttatggacaaattagtttcagtttctttaccaagagttagagattttagaggagttaaccctaatgcttttgatggtagaggaaattatgctttaggagttaaagaacaattaatattccctgaaatagaatatgataaaatagataaagtaagaggaatggatataatatttgttactacagcaaaaactgacgaagaagctcgtgaattattaaaattattaggaatgccattttctaagtaagcaaaggagggattcccgtggctagaaaagcgatggttgttaagcaacaaagaaagcaaaagtacgctactagagaatacactagatgtactatatgcggaagaccgcattcagttttgaaaaaatttggtatatgccgtatatgctttagagaattagcttataaaggtcaaatacctggtgttagaaaagcaagctggtagaagcttgattagaatggaaggagggcaacaaaatgacaatgacagatccaattgcagatatgcttactcgtataagaaatgctaatgttgttaagcatgaaactgtagatgttccagcttctaatatgaagaaagaattagctagaatcttattagaagaaggtttcataagaggttatgatgttatagaagatggaaaacaaggtatcataagaatacaattaaagtacggacaagaaggcgaaagagttataacaggtcttaagaaaatatctaagcctggaatgagagtttacgctgctaaccatgagataccaaaagtattaaacggattaggaatatcagttatatctacttcaaaaggaatattaactgacaagcaagctagaaaagaaaatgttggtggagaagtaatctgctacgtttggtaattaatatgaacaatgtaaggaggtgcgaccatgtcaagaataggtgttaagccaataataataccagcaggtgttgaagttactatagctgaaggaaatttagttacagtaaaaggtccaaaaggaactttaactaaacaattaagtgctgagttaaacataaaaaaagaagaaaatacaataatggttgaaagaccaactgataataaaaaacatagatctttacacggactaactagaactttattagataatatggttgtaggtgtaaatactggtttcgaaaagaaattagaattaaaaggtgttggatatagagctcaaaaacaaggaaagaaattagttatgaacttaggtttctctcatccagttgagatggaagatccagaaggaataactgttgaagctccaaaccaaacagagttaatagtaaaaggtatagacaagcaattagtagggaattatgctgctaagataagagcttggagaaagccagagccatacaaaggtaaaggtataaaatacgttgatgaagtaatcagacgtaaagaaggaaaaactggtaaaaaataataccaaaacttaaacgctagaaaggagtgagctaggtgttaaaaaaggctgataaaaatgctaatagacttcaaagacataagagagttcgtagaaaaataagcggtacttctcaaagaccaagattatgtgtatttagaagtgctaacaatatatatgctcaaataatagatgacacaaaaagagtaactctagttgctgcatcttctttagaagcagaagttaagagtgctgtcaatcatacaggaaacaaggaagcagctaagaaagttggagaattagttgctaaaaaagctgttgaaaaaggaatcactgaagttgtatttgacagaggtggatacttatatcatggaagaattcaagaattagctgaaggtgctagagaagctggtcttaagttctaatacgaaggagggaaaaatacatgctacgtcgtaagccgatagatgcaggacaacttgacttacaagaaaaagttgttgaagtaagacgtgttactaaggttgtaaaaggtggtagaaatttcagatttgcagcattagtagttgttggagatgaaaacggacacgttggtataggtgctgggaaagcaatggaagtaccagacgctataaaaaaagcagttgaagatgctaagaaaaatctaatagtagtgccaatagttgggactacaattcctcacgaagtacgcggacactttggtgctggaaatatattaataatgcctgctgtagaaggtacaggagtaatagctgggggacctgctagagccgtacttgagctagctggactaaaagacgttagagctaaatctttagggtctaacaatccaagaaatatggtaaatgctacaatagaaggacttaattctctaaaaacagttgaagatatagctaaacttagaggtaaaaaagttgaagaacttctagggtaaggaggtagtgtaaaatggctaaattacaaataaagttagttagaagtgttataggaactactcctaaccaaaaaaagaatgttgaagcgttaggattaagaaaaagagaacaagttgttgtaaaagaagacaatgctcaaacaagaggtatgataaataaagtaagtcacttattagaagtaactgaaatagctgaataatttttataaagtagtgcaaggaggtgcaatccatgaagttacatgagttaaaacctgctgaaggtgcagtaagagctaagagaagattaggtagaggtactgcaactggacaaggtaaaactgcaggacgtggacaaaaaggtcaatggtctcgttctggtggtggagtaagagtaggatttgaaggtggacaaatgccactagctagaagacttcctaagagaggtttcaataacatatttaagaaagtttacacagaagttaatgttgaagttttaaacagatttgaaaatggaacagaaataactgcagaattattaaaatctactaaaactataagcaaaataggtaaagacggaattaaaatcttaggtgaaggtaatttagagaaagctttaactgttaaagctgctaaatttacagcttcagctcaagaaaaaatagaaaaagctggtggaaaagcagagttagtataataacctgctaatctcctagccagtacaggcggggtgaattagcgtgctgtcaaaattaaaacaagcttggaagattaaagcagtaagaaaaaaagtaatgtatacacttatgatgatcgtgatattcagaataggtactactataccagttccaggcatagacactagtattatacaaaagatggtaggcggcaatagtctactttctctgtataatatgtttactggtggagcatttagtaacttttcactatttgctttaggtataagtccatatatcactgcatcaatcataatacaacttctaacagtaggttttgaaagtttagcagaacttcaaaaatctggtgaagaaggaaagaaaaaaatcaataagtacactaaatatacagcactagctctagcagttgtacaagctttgggaattacattaggaattgtaagaagtgctttaatatcaaatagtgtgttttttatcacaactgttgtaataacattagtttcagcaagtatgttagtaatgtggattggggacaaaattactgaaaaaggaatcggtaatggtagttcagtaataatatttgcaggtataatatcaagaatacctacagatgttattaaaatatcgcaacaagttaaatctggcgaagttgcaccttgggttatagtgattctagctgtagttatattacttacagtaacaggagttacatttatacaagaagcaactagaaagatacctgtacaatatgctaaaagagttgttggaagaaaaatgtatggaggacaaagttctcatataccaatgaaagttaaccagtcaggagttatgcctataatttttgctagttcacttttagctttccctcaaacaatagctatgtttatgggtccaaatgctcaggcttttgttcaaaaatacttaagtatggcaacagaacaaggattttggacatatagatcaattgagattctacttataattttcttctcatatttttatacaactgtatcatttaatacagaagacatatctaaaaatatgaaaaataatggtggatttataccaggtataagaccaggtgagcctactatggattatttaaatagaattttaactagattaactttagctggagctactttcttagcaataattgctatggtgccagctcttacaacacattatatgaaagtaaatatgagtctagctgggacttcattgctaatcgttgttggagttgctttggagcttaagagacagttagagtcaaacttagttatgagaagctatcaaggtttcttaaaataaaatggagatggataatatgagaataatattacttggacctccaggtgctggtaaaggtactcaggcggcaggaatagtagaaaaatacaatatacctcatatatcaacaggagatatattcagaaagaatataaaagagggaacagaacttggaaaaaaagctaaagaatacatggaccaaggtttattagtaccagatgagttaactgtaggtttagttactgatagaatatctcaagaagattgtaaaaatggatttatgttagatggatttccaagaaatgtagcacaaggagaacatttagatatcttcttaaaaaatgctggtatatcactagataaagttgtcaatattgaagttgataagagtatattagtgtctagagcagttggtagaagaatatgtaagtcttgtggagctacttaccatgttgagtttaatcctcctaaagtagaaggtgtatgtgatgtatgccaaggagaattatatcaaagagctgatgataatgaagaaactgtatctaagagaatacaagtttatctagatgaaactaagcctttagtagattattatagcaaacaaggtataatagcagatataaaaggtgatcaagcaatagataaagtatttgaagatattgtcgcagccttaggaagtggaaaataaatgattatcttgaaatcaaaaaaagaaatagaacttttaagagaagcaggtaaaatagttgctgacactcatgaagttttaagaaaagctatttctccgggaatatctactttagaattagataaaatagctgaagagaatataagaaaatacaatgcagagccttcttttaaaggatatggaggttttccaggaagtatatgtgcttctatcaatagagaggtagtacatggtattccaggagaaactatattacaagaaggtgacattgtaagtttggatataggagcctattataaaggatatcatggtgattctgcgaaaactcacggagtaggcatgatatctgaagaagataggaaattgatagaagtaactagagaaagcttctatgaaggaataaaatttgctaaattaggatatagactttcagatatctcacacgcagtacaaacacacgttgagaaacatggtttctcggtagttagagatttagtgggtcatggagttggagcaaatcttcatgaagacccacaagtacctaattatggactcccaggaaaaggaccaagacttagagaaggaatggttattgctatagagccaatggttaatgcaggtcgttatcatgtaaagactctatcagatgggtggacgactgttacaatagatggaaaaaaatcagctcattatgagcatacgatagcaattactgaacatgaacctttgatattgacaaagttgtaatttaaaaagtaggtgaaaaaagtgctatcagataatttaagtataggtcaagttgttaaagtttcattaggacgagataaaggaaatttattctttgtagtcaaaataattaataatgaatatgtattaatagctgatggaaaaaagagaaaacttgacaaacctaagttaaagaaagtgaagcacttaaaaaaatataattttattaatgatgaagttagaaaaagagtagtatctggacaagagattacagattcttttttaagagctgaacttactaagttaaattagataatttaacttattgaaatggagggctggttagttaatggccaaaaaagatgttatagaattagaaggtacagtttcagaagctttacctaatgctatgttcaaagttaaactagaaaatggacatgagatattatgccacatttctggaaagctaagaatgaacttcataagaattcttgaaggtgacaaggtgaatgttgaactttctccatatgaccttacaagaggaagaattacttggcgtaagaagtagactatattaatatttagtctaaggagggattaataatgaaggttagaccatcagtaaaaccaatatgtgaaaaatgtaaagtaataaaaagaaaaggaaaagtaatggttatctgtgaaaatccaaagcataagcaaaagcaaggataagaaattattactagcattttgttaaattttatagtataatactatattgtgatgttaacaaaagaacgttaaaatcgttgaacaatctggcgtaggattggcatatgatgtgaagttttaaacactaaaaactatgtgtaggaggtgcgatcatggcaagaatagctggggtagatttacctagagaaaaaagagcggagataggcttaacttatatatatggtataggtaaagcaactgctaacgaaatattagctaaggctgagataaatccagatactagaataaaagatttatcagaagatcaagttaatgagttaagaaaagttatagatgacgatttcttagttgaaggtgacttaagaagagaaattgctttaaacataaagagattaagagatataaaatgttatagaggaataagacacgctaaaggtcttccattaagaggacaaagaactaagactaatgctagaactagaaaaggtcctagaaaaacagtatctcgtaaaaagaaaaaataaataaataataactagatgaaggagggaaaaggaaaatggctaaaccaaaaaagaaagttacacgtattagaagaagagaacgtaaaaatatagaacgtggtcatgctcatatacaatcaactttcaataatacaataataactttaactgacgttcacggaaatgctatatcttgggcaagttctggacaattaggattcaaaggatcaagaaaatcaactccatttgcatctcaaatggctgctgaaacagctgcaaaagctgcgatggaacacggactaaaaagtgttgaggtattcgtaaaggggccaggttcaggaagagaagctgcaataagagctttacaagcaactggactagaagtaactatgataaaagacgttactccaatcccacataacggatgcagaccaccaaagagaagaagagtgtaattaataagagtacaataggaggtgtagataaatggcaagatatacaggtgcatcatgtagacaatgccgtagagagggaatgaaattattccttaaaggtgatagatgttatacagacaaatgtgctatagtaaaaagaaactatgctccaggtcaacatggccaaggaagaaagaaagtttctaactatggattacaattaagagaaaaacaaaaagttaaaagaatatatggagttttagagactcaatttagaaatttatatgaacgtgctgaaaatatgcctggtaaagcaggtgagaacttattaagtttattagagagaagattagataatgtagtttacagaatgggactagcatcttctagaaaagaagctagacaattagtgactcatggtcatttcactttaaatggaaataaagtagacataccttcattaatagttaaggttggagatgttatagaagttaaagagaaatcaagatcttctgcaaaattcaaaaatttagtagaagttaactcaagaatagctcctaagtggttagaagctaatgtagaaggaatgacagcaaaagtagttggtgttccaacaagagaagatatagatcttgagatagcagagcacttaatcatagaactttactctaaataataagcacacttttaaaaattattttaaaattttgtttaccctcagtggattactgaattttaaggagggttttgtccatgatagaaatagaaaagccaaaagtagatatagttgagcttagcgaagactatagatatggtaagtttgttatagagcctctagaaagaggatatggaataactataggtaacgcattaagaagaatattattatcatcattaccaggtgtagcagtgaatgctataaaaatagatggagttcttcatgaattttcaacaatacctggtgttaaagaagatgttactgagataatattaactttaaaagagctttcagcaactatagatggtgaaggaagtagaacacttaaaatagaagctcaaggaccatgctctatcacaggtgcagatataatctgtcctccagatgttgaaatattaagtaaagatttagcaatagctacattagatgataatgctaaacttaatatggagatatttgtagataaaggtagaggttatgtttctgctgaagaaaataaaacagagaatgttccaataggtgttttacctgtggattcaatatatactcctgttgagaaggttagttatcatgtggaaaacacaagagttggtcaaaaaacagattatgataaattagtactagaagtttggactaatggtagtataaatcctcaagagggaatatcattagctgcaaaggtattagttgagcatttaaacttatttatagacttaactgaacatgtaagtagtgttgaaatcatggtagaaaaagaagaagatcaaaaagaaaaagttcttgaaatgactatagaagaattagatttatcagttagatcatataactgtttaaagagagcgggaattaatacagttgaagaattagctaataaatctgaggatgatatgatgaaggttagaaacctaggtaagaagtcattagaagaggtaatacaaaaactagaagaacttggattgggattaaaaccaagtgaagaatagcgagcaaaggagggataagaatggctaagtaccgtaaattaggacgtgaaacagctcacagaaaccttatgttaagaaacttagtaacttgcttactaagaagtggaagaatagaaactacagtgactagagcgaaagaaactcgtagaatggctgaaaagatgataactcttgctaagagaggagatcttcatgctagaagacaagttttagcttatgttatggatgaaacagtagttaataacttattcacagatttagctccaaaatatgctgagagaaatggtggatacactagaataataaaaatagggccaagaaaaggcgatgctgctgaaatggcttttatagaattagtatagtaaggaaaggattaggcttgatggcttaatcttttttttatttttttgactaaggtatgatataataatgtgtaaaatgatttttataagttattgcttactaaaaggagtatgagttaatggataatatagtaaaggtaaataatatttcgtttgagtatattacagatgaagcaaaacttaaagcaatagataatttaagcctagatgttaaaaaaggagaatttgttgcgataataggacataatggttctggtaagtctactttatctaaaaacttaaatgctattcttatgcctactgaaggaaatattcttattgatgatatggatactaaagaagaagaaagattatgggatataagacaaactgcaggcatggtatttcaaaatccagataatcaaatagttgctactatagtagaagaagacgttgcatttggacctgagaacttaggtatagaaccaaaagaaataagacgaattgtagaggagtctttaaaaagtgtaggtatgtatgatttaagagatagacagcctcatttgttatcaggaggtcaaaagcaaagagttgcaatagcaggaattattgctatgaggcctaaatgtataatatttgatgaagcaacagcaatgttagatccatctggaagaaaagaagttatgaaaacaataaaaagacttaataaggaagaaaatataactgttatacatataacgcactttatggaagaagcagtagaagctgatagagttgtagttatggaaaaaggaaagaaaatcttagagggaactcctagagaagtattcagtaaaataaagatgttaaaggaaatcggtttagatgtaccttgtatgacagagttatctagtttattaatagaagaaggtataaatattagtagtgatatattaactgtggatgagatggtgatggaattatgtcaattatagtaaagaatttaacacatatatataatgaagggatgccttttgcaagtaaggcacttgatgatatttcttttgagattaaagatagagattttgttggtcttataggtcatacaggctcaggaaaatctacattaatacaacatttaaatggattactaaagccttcctcaggagaaatatttataaatgattttaatataacagataaaaacttgaatttaactgagattagaaaaagagtaggggttgtatttcaatatccagaataccaattgtttgaagaaacgattgataaagatatagcttttggaccctctaatttaggcttagaggagtctgagatacataacagggtaaaagcatcaatggaagctgtaggacttgattatgagggatttaaagacaaatctccttttgaattatctgggggacaaaagcgtagagtagcaattgctggagttatagccatgaacccagaagttctcatattggatgaaccaactgctggtcttgaccctggtggaagagatgaaatttttaacttaataaaagacttacatgaaaaaaagaatatgactataatactatcatcacatagtatggatgatatggcaaagttagcaaaaactttaattgttatgaatcatggtagcgtagaatttatgggaactcctagagaagtgtttaaatcaaatgctagtaaattaaaagatataggattagatattccacaagttttagagcttgcattgaaattgagagaaaaaggctttgacatcagtgaggatatattgactttagaagaagcaaaacaggaaatattaaaagttgtgagaggacgaggattatgttaaaagatataactatagggcaatactacccaacaagttctgctattcataaattagatccaaggataaagcttgtagcgacaattgtatttatggtatctatatttgtagtaaataaattttggccttatatagtagttttattatgtttattagctatgataaaattggctaatataccagtcaaatatattgttaagggtgttaaacctcttaaatggattattttgtttacatttcttataaatatttttttcttaccaggtgatgaaatatggtcatttggatttttagctattacaaaacagggtctaagacaagcaatttttatggcaataagattaatatttttagtagttggtacatcattgcttactttaacaacttcaccaatagaattaactgatggaatagagagattgttgaatccatttaagaaaattggtttgccagttcatgaacttgcaatgatgatgacaattgctttacgttttattcctacattgttagatgagacagacaaaataatgaaggctcagatgtctagaggtgcagattttgaaagtaagaatcttataaatagagcaaagaatttagtaccacttttggtacctttatttgtaagtgcatttagaagagctgatgaattggctatggccatggaggccagatgttacagaggtggacataataggactaagatgagagagtctgttatatcaagaagggattatatggcatgtgtatttcaggttgtttatctgggagcaattatagctactagatttatagcaatttaattaataagttatagatataatgaggtaaagtatgagaaatataaaaattaaaatccaatacaatggtaagaattattgtggatggcaaaagcaacctgattctttagggatacaaggtacaattgaaagggctatatatgatataacaaaagaagaaaccagtcttatagggtctggtagaactgattcaggagttcatgctattggtcagattgcaaattttaaaattaattcaggtataagtatagaaagtataccaatggcactaaatgccaagttgccaaaagacatatcagttatagaagcatgtgaagtaaatgatgattttcactccagatacagtgcaaaaggtaaaacatataaatatttagtatataatagcaagtttagaaatccaatacttagtgagatatcatatcaagtaaaatatgaacttgattttgataaaatgtgttcagaagcaaaaagtttattaggaacacatgattttaaaggttttatgagttctggttcatctgtaaaagatacagttagaacgatatatgatattgatataagtaaaaaagatgacttgattacttttgagattagtggtaatggttttttatataacatggtgaggattattgttggaacacttgttgatatgggtcgtggcagaattaacgaaccatttttagatataatacaatcaaaaactaggtcaagatgtggacatacagctccagcacaaggattatttctcaaaaaagttcattattaacttgacacaccaggctacatgtattaaaatatatgagaatgtgttaataagtccacttgccccggacttgacataaacggtaaaaaaattttatgaaaagtagttaaggagggacagttatgaaaagttatatagctaagccagctgatgtacaaagaaaatggtacttagttgatgctgaaggaaaaacattaggtcgtttagcaacagaaattgcgacagtattgagaggtaaacataaaccaacatttactcctcacgttgatggtggagattttgttgttgtagtaaatgcagaaaaaatagttttaagtggtaagaaattagatcaaaaatattacagataccatactggttatgtaggtggattaaaagaaatatcttacagagatatgatggataagaaaccagaagaagttatatcacatgctgtaagcggtatgttacctaaaaataaattaagaagcagaatgatgactagattaagagtatttgcaggtgctgagcacactcatgcagctcaaaatccagaagttttaaactttaaataagattaataggtgaaaggaggagtttataatggctaacgttcaatattatggaactggaagaagaaaaagttctgttgctagagtaagactagttgcaggtgaaggaaatatattagtaaatggaagagcattagaaaattattttaattatgagacattaataagagatgttaaacaaccattagttttaactggtaatgaaaataaatatgatgttatagtaaaagttgaaggtggaggattcactggacaagctggagctataagacatggaatatctagagctttattaaaagctgatttagatttaagacctgctttaaagaaagaaggtttcttaactagagatgcaagaatgaaggaaagaaagaaatacggattaaaagcagcaagaagagctccacaattctcaaaaagataattacttatttttttggaaaagcaaaatcctttatttactgttattcagaaagtattggtattttaaaaatgttgggttaagttaattattgatatataataaaataataagatatcttattaggatgtttttcattaagaagaacatcctttttattttgactatttaataaaaaacatatgctaataacatttaaattttatttttataatattgtaatttaaaagtttatataaggttatatattttaagatattatttaacaatataaattctgaatatacgttatcaaagtttataatataaactaagtataatttattgtatagtattgaatgttagataaacatagtgaattaaataggggcagaaatataatatcattacataataatatattaataccaataaataaagatatatcaatattaaaaaaatttaaatgtttgtactaatatatggaatattatagtgtttttataagtatacatatacagggtgatgttgtgagaaagtacataaaacatataatttttagttttgcaatgatatgtctagtagtagtatccatatttgaaattaaaaatatttctgaagatgttatcaagtatatgccagtaacaaacaaaactataattttagatgctggtcatggaggcattgatccaggtgcattaaataaggataagagtacatctgaaaaggatattaacctagcaataacacttaagcttagagagcttatagaatcaagtggtggccttgtaatattaactcgagaagatgacagtagcctttataaagaagaaaataataaaactacaagacaaaaatataatgagaatttgaaaaatagaaaagaaataatatctaattctaatgccaatatgtttgtctctatacatcttaatgcatttgaacaatcaaaatactatggagctcaaactttttatcctaaagacaaacaagacagtaaagaattatcgaagtgtattcaagaagaacttaaaagagtagtagataagacaaacaacagagaagtcaaaccaagggatgatatatatcttttgaaagaaaataatattccatcagtactgatagaatgtggttttttatcaaatgaaaaagagtgtaaactcttaactgatgaaacatatcaagaaaaaatagcatgggcaatctacataggaatacaaaaatatttaagttgaaataagtataaaaataggtctaaatatgtaaatagcttgtattaaagcagttaaaatgcattaatataggctatttttattttgacaaaaaaatatttaaaataaaagttaaaaagttgttgacttagaataatatagatgatattatatatgagtgcccaaaaggagcaccaaaataagacaaaagaactttgaaaattaaacagtaggttaatttataaacaagaaacaaaccataaagccagatattttgataacaatagtatctgagcctgataaacttttatttgagagtttgatcctggctcaggatgaacgctggcggcgtgcctaacacatgcaagttgagcgatttacttcggtaaagagcggcggacgggtgagtaacgcgtgggtaacctaccctgtacacacggataacataccgaaaggtatgctaatacgggataatatatttgagaggcatctcttgaatatcaaaggtgagccagtacaggatggacccgcgtctgattagctagttggtaaggtaacggcttaccaaggcgacgatcagtagccgacctgagagggtgatcggccacattggaactgagacacggtccaaactcctacgggaggcagcagtggggaatattgcacaatgggcgaaagcctgatgcagcaacgccgcgtgagtgatgaaggccttcgggtcgtaaaactctgtcctcaaggaagataatgacggtacttgaggaggaagccccggctaactacgtgccagcagccgcggtaatacgtagggggctagcgttatccggatttactgggcgtaaagggtgcgtaggcggtctttcaagtcaggagtgaaaggctacggctcaaccgtagtaagctcttgaaactgggagacttgagtgcaggagaggagagtggaattcctagtgtagcggtgaaatgcgtagatattaggaggaacaccagttgcgaaggcggctctctggactgtaactgacgctgaggcacgaaagcgtggggagcaaacaggattagataccctggtagtccacgctgtaaacgatgagtactaggtgtcgggggttacccccttcggtgccgcagctaacgcattaagtactccgcctgggaagtacgctcgcaagagtgaaactcaaaggaattgacggggacccgcacaagtagcggagcatgtggtttaattcgaagcaacgcgaagaaccttacctaagcttgacatcccaatgacatctccttaatcggagagttcccttcggggacattggtgacaggtggtgcatggttgtcgtcagctcgtgtcgtgagatgttgggttaagtcccgcaacgagcgcaacccttgtctttagttgccatcattaagttgggcactctagagagactgccagggataacctggaggaaggtggggatgacgtcaaatcatcatgccccttatgcttagggctacacacgtgctacaatgggtagtacagagggttgccaagccgtaaggtggagctaatcccttaaagctactctcagttcggattgtaggctgaaactcgcctacatgaagctggagttactagtaatcgcagatcagaatgctgcggtgaatgcgttcccgggtcttgtacacaccgcccgtcacaccacgggagttggagacgcccgaagccgattatctaaccttttggaagaagtcgtcgaaggtggaatcaataactggggtgaagtcgtaacaaggtagccgtatcggaaggtgcggctggatcacctcctttctaaggagaattgcctactgtttaattttgaaagttctttacgaactttatatatgggggtgtagctcagttgggagagcacttgccttgcaagcaaggggtcaggagttcgactctcctcatctccaccatttaagagtatattacttaaatctttgatttacttagtagcctcttacaatgcacttatagcttaaatttatacaagctttgtgcgttagcactttaagcaacgggatttattcgttggcgacgtgctttagcactttgaaaactgcatatatatttagtgatatgacatctaatttgtaatatataaagctgataactttttaaaattatcgaagttgatagcttctaatctatcaaacctttttaactggtcaagttattaagggtgcagggcggatgccttggcactaggagccgatgaaggacgtgataagctgcgataagcttcggggagttgcacgtaaactttgatccgaagatttccgaatgaggaaactcacttagagtaatgtctaagtatcattaagtgaatacatagcttaatgaggggaactcagggaactgaaacatctaagtacctgaaggaagagaaagaaattcgattccgtaagtagcggcgagcgaacgcggattagcccaaaccaataaagttttctttattggggttgcggacatatcataacgaagaggtatcgtaattgaagaggtttggaaagacccaccacagaaggtaatagtcctgtatgttaaacgagaagacttcagatatgatccagagtaccacgggacacgtgaaaccctgtgggaagcaggagggaccaccctccaaggctaaatactacctagtgaccgatagcgtatagtaccgtgagggaaaggtgaaaagaaccccgggaggggagtgaaatagaacctgaaaccctgcacttacaagctgtggaagcacatttcttgtgtgaccgcgtactttttgtagaacgggccaacgagttacgttaagtagcaaggttaagcacttaaggtgcggagccgtagcgaaagcgagttttaactgagcgttcagttacttgacgtagacccgaaaccgggcgacctacccatgagcaggatgaagcgaaagtaaaatttcgtggaggtccgaacccacgagcgttgaaaagctcggggatgacttgtgggtagcggtgaaattccaatcgagcccggagatagctggttctccccgaaatagctttagggctagcctcaaggtgagagatacggaggtagagcactgaatgtcctagggggtattgcacctaccgaagactatcaaactccgaatgccgtcatcttatacttgggagtcagactgtgggtgataagattcatagtcgaaagggcaacagcccagatcgtcagctaaggtccctaaatgtaagttaagtggtaaaggatgtgggattgcacagacaaccaggatgttggcttagaagcagccactcattcaaagagtgcgtaatagctcactggtcgagtgatcctgcgccgaagatttccggggctaaaacttactaccgaagctacggcatcagtaatgatgggtaggggagcttcccatacgggttgaagcatgaccgtaaggacatgtggacagtatgggagtgagaatgttggcatgagtagcgagatgtgggtgagaatcccacaggccgtaaacccaaggtttccaggggaaggttcgtccgccctgggttagtcgggacctaagctgaggccgaaaggcgtaggtgatggacaacaggttgatattcctgtactaccgataaccgtttgagagaagggatgacacagtaggataagctaagcacactgttggttatgtgtgcccaagcattgaggcagtcaaagtaggcaaatccgctttgataatgctgggatgtgatggggagcgaaatttagtagcgaagtagctgatttcacactgtcaagaaaagtctctatcgaggttaaaggtacccgtaccgcaaaccgacacaggtgggtgaggagagtatcctaaggccagcgagagaactgttgttaaggaactcggcaaaatgaccccgtaacttagggataaggggtgccaccatcaggtggccgcagagaataggcccaagcgactgtttaccaaaaacataggtttctgctaagtcgcaagacgatgtataggagctgacgcctgcccggtgctggaaggttaaggggatctgttagagcaatcgaagcagtgaacttaagccccagtaaacggcggccgtaactataacggtcctaaggtagcgaaattccttgtcgggtaagttccgacccgcacgaaaggcgtaacgatttgggcactgtctcaacaacagactcggtgaaattgtaattccggtgaagatgccggatacctgcgacaggacggaaagaccccatggagctttactgtagcttgacattgggtcttggtactacatgtacaggataggtgggaggctttgaaaccaggacgccagttttggcggagccatccttgggataccacccttgtagtactgggactctaaccataggccatgaatctggtcttgggacactgtcaggtgggcagtttgactggggcggtcgcctcccaaaaggtaacggaggcgctcaaaggttctctcagtacggtcggaaatcgtacgtagagtgtaaaggcaaaagagagcttgattgcaagacatacaggtcgagcaaggatgaaaatcggacttagtgatccggtggttctgcgtggaagggccatcgctcaacggataaaagctaccctggggataacaggcttatctcccccaagagtccacatcgacggggaggtttggcacctcgatgtcggctcatcacatcctggggctgtagtaggtcccaagggttgggctgttcgcccattaaagtggtacgcgagctgggttcagaacgtcgtgagacagttcggtccctatccgtcgcaggcgtaggaaatttgagaagacctgtccttagtacgagaggaccgggatggacgtacctctggtgtaccagttgtcctgccaagggcatggctgggtagctatgtacggaatggataagcgctgaaagcatctaagcgcgaagccaacttcaagataagatttcccaccgcaagggtaagaccccagaaagactatctggttgataggtcgaaggtgtaagtgcagtaatgtatttagcttatcgatactaataggtcgaggacttgaccaatattatttgatgttattcattaagatatatgtgcagtttttagagtgttaactctaaaaaaaaataaaaaaagtattgacaaaaatagtaaaaaatgttaatattatacttgtcctagcaacaagaaaaaaatgtggttataatagcagagaagatacacctgtttccattccgaacacagaagttaagttctctagcgctgatggtacttggtgggaaactgcctgggagagtagggcatagccacgtgaatgttccaaggtagctcaacggtggagcaaccggctgttaaccggtaggctgtgggttcgagccccacccttggagccattatggctcgttggtcaagaggttaagacaccgccctttcacggcggtaacaggggttcaattcccctacgagtcaccatttgtgggatcatagctcagctgggagagcacctgccttacaagcagggggtcacaggttcgagccctgttggtcccaccatttgcggcctggtagttcagttggttagaatgccagcctgtcacgctggaggtcgagggttcgagccccttccaggtcgccaaaataaaaatgctggtgtggctcaacggtagagcagctgacttgtaatcagcaggttgtaggttcgattcctatcaccagctccatgtaaaactaatacggaggatttcccgagcggccaaagggggcagactgtaaatctgttgtcatcgacttcggtggttcgaatccaccatcctccaccaattaaatatgcgggtgtagctcaatggtagagttctggccttccaagccagctgtgagggttcgatccccttcacccgctccaaagaaagcgtgggtgcatagctcagctggatagagcaacgcccttctaaggcgtgtgtccggggttcgaatccctgtgcgctcaccacatatatattggggattagccaagtcggtaaggcacatgactttgactcatgtatgcgtaggttcgagtcctgcatccccagccaaataaaaatatggtctattagctcagtcggtagagcacctgacttttaatcagggtgtcccgcgttcgagtcgcggatagatcaccaatggagaggtgtccgagtggtttaaggagctggtcttgaaaaccagtgacttcgaaaggggccgtgggttcgaatcccaccctctccgccaaaaaaatgactgaatttggagaagtactcaagtggctcaagaggatcccctgctaagggattaggctgggtaaccggtgcgagggttcgaatccctccttctccgccattcaaaaacgaggtgtagcgcagtttggtagcgcacatggtttgggaccatggggccgggggttcgagtcccttcacctcgaccaacttaagcttttagttcagttggttagagtgcccaactcatggctagtaattctagggtttgagtccatgaaggttattcttcataggggtgtagctcagttggtagagcgtcggtctccaaaaccgtgcgccgggggttcgagtccctccacccctgccaaataaaaaggacttgaaaaaagttggattttagagtagtataagatagtaaataagatttcgaggtgtagcgcagtttggtagcgcacatggtttgggaccatggggccgggggttcgagtcccttcacctcgaccaagaaaagggcctatagctcaggtggttagagcgcacgcctgataagcgtgaggtcgctggttcgagtccagctaggcccaccatttgcccagatagctcagtcggtagagcaggggactgaaaatccccgtgtcggtggttcgattccgcctctgggcaccaggaatacggcggtatagcttagttggctagagcgttcggttcatacccgaaaggtcataggttcgactcctattaccgctaccatctaactatatcaataaagaactttgaaaattaaacagtaggttaatttataaaacaagaaacaaaccataaagccagatattttgataacaatagtatctgagcctgataaacttttatttgagagtttgatcctggctcaggatgaacgctggcggcgtgcctaacacatgcaagttgagcgatttacttcggtaaagagcggcggacgggtgagtaacgcgtgggtaacctaccctgtacacacggataacataccgaaaggtatgctaatacgggataatatatttgagaggcatctcttgaatatcaaaggtgagccagtacaggatggacccgcgtctgattagctagttggtaaggtaacggcttaccaaggcgacgatcagtagccgacctgagagggtgatcggccacattggaactgagacacggtccaaactcctacgggaggcagcagtggggaatattgcacaatgggcgaaagcctgatgcagcaacgccgcgtgagtgatgaaggccttcgggtcgtaaaactctgtcctcaaggaagataatgacggtacttgaggaggaagccccggctaactacgtgccagcagccgcggtaatacgtagggggctagcgttatccggatttactgggcgtaaagggtgcgtaggcggtctttcaagtcaggagtgaaaggctacggctcaaccgtagtaagctcttgaaactgggagacttgagtgcaggagaggagagtggaattcctagtgtagcggtgaaatgcgtagatattaggaggaacaccagttgcgaaggcggctctctggactgtaactgacgctgaggcacgaaagcgtggggagcaaacaggattagataccctggtagtccacgctgtaaacgatgagtactaggtgtcgggggttacccccttcggtgccgcagctaacgcattaagtactccgcctgggaagtacgctcgcaagagtgaaactcaaaggaattgacggggacccgcacaagtagcggagcatgtggtttaattcgaagcaacgcgaagaaccttacctaagcttgacatcccaatgacatctccttaatcggagagttcccttcggggacattggtgacaggtggtgcatggttgtcgtcagctcgtgtcgtgagatgttgggttaagtcccgcaacgagcgcaacccttgtctttagttgccatcattaagttgggcactctagagagactgccagggataacctggaggaaggtggggatgacgtcaaatcatcatgccccttatgcttagggctacacacgtgctacaatgggtagtacagagggttgccaagccgtaaggtggagctaatcccttaaagctactctcagttcggattgtaggctgaaactcgcctacatgaagctggagttactagtaatcgcagatcagaatgctgcggtgaatgcgttcccgggtcttgtacacaccgcccgtcacaccacgggagttggagacgcccgaagccgattatctaaccttttggaagaagtcgtcgaaggtggaatcaataactggggtgaagtcgtaacaaggtagccgtatcggaaggtgcggctggatcacctcctttctaaggagaattgcctactgtttaattttgaaagttctttacgaactttatatatgggggtgtagctcagttgggagagcacttgccttgcaagcaaggggtcaggagttcgactctcctcatctccaccatttaagagtatattacttaaatctttgatttacttagtagcctcttacaatgcacttatagcttaaatttatacaagctttgtgcgttagcactttaagcaacagaataaactgaacgtatgtgaagtttgtttgttggcgctgtgctttagcactttgaaaactgcatatatatatttagtgatatgacatctaatttgtaatatataaagctgataactttttaaaattatcgaagttgatagcttctaatctatcaaacctttttaactggtcaagttattaagggtgcagggcggatgccttggcactaggagccgatgaaggacgtgataagctgcgataagcttcggggagttgcacgtaaactttgatccgaagatttccgaatgaggaaactcacttagagtaatgtctaagtatcattaagtgaatacatagcttaatgaggggaactcagggaactgaaacatctaagtacctgaaggaagagaaagaaattcgattccgtaagtagcggcgagcgaacgcggattagcccaaaccaataaagttttctttattggggttgcggacatatcataacgaagaggtatcgtaattgaagaggtttggaaagacccaccacagaaggtaatagtcctgtatgttaaacgagaagacttcagatatgatccagagtaccacgggacacgtgaaaccctgtgggaagcaggagggaccaccctccaaggctaaatactacctagtgaccgatagcgtatagtaccgtgagggaaaggtgaaaagaaccccgggaggggagtgaaatagaacctgaaaccctgcacttacaagctgtggaagcacatttcttgtgtgaccgcgtactttttgtagaacgggccaacgagttacgttaagtagcaaggttaagcacttaaggtgcggagccgtagcgaaagcgagttttaactgagcgttcagttacttgacgtagacccgaaaccgggcgacctacccatgagcaggatgaagcgaaagtaaaatttcgtggaggtccgaacccacgagcgttgaaaagctcggggatgacttgtgggtagcggtgaaattccaatcgagcccggagatagctggttctccccgaaatagctttagggctagcctcaaggtgagagatacggaggtagagcactgaatgtcctagggggtattgcacctaccgaagactatcaaactccgaatgccgtcatcttatacttgggagtcagactgtgggtgataagattcatagtcgaaagggcaacagcccagatcgtcagctaaggtccctaaatgtaagttaagtggtaaaggatgtgggattgcacagacaaccaggatgttggcttagaagcagccactcattcaaagagtgcgtaatagctcactggtcgagtgatcctgcgccgaagatttccggggctaaaacttactaccgaagctacggcatcagtaatgatgggtaggggagcttcccatacgggttgaagcatgaccgtaaggacatgtggacagtatgggagtgagaatgttggcatgagtagcgagatgtgggtgagaatcccacaggccgtaaacccaaggtttccaggggaaggttcgtccgccctgggttagtcgggacctaagctgaggccgaaaggcgtaggtgatggacaacaggttgatattcctgtactaccgataaccgtttgagagaagggatgacacagtaggataagctaagcacactgttggttatgtgtgcccaagcattgaggcagtcaaagtaggcaaatccgctttgataatgctgggatgtgatggggagcgaaatttagtagcgaagtagctgatttcacactgtcaagaaaagtctctatcgaggttaaaggtacccgtaccgcaaaccgacacaggtgggtgaggagagtatcctaaggccagcgagagaactgttgttaaggaactcggcaaaatgaccccgtaacttagggataaggggtgccaccatcaggtggccgcagagaataggcccaagcgactgtttaccaaaaacataggtttctgctaagtcgcaagacgatgtataggagctgacgcctgcccggtgctggaaggttaaggggatctgttagagcaatcgaagcagtgaacttaagccccagtaaacggcggccgtaactataacggtcctaaggtagcgaaattccttgtcgggtaagttccgacccgcacgaaaggcgtaacgatttgggcactgtctcaacaacagactcggtgaaattgtaattccggtgaagatgccggatacctgcgacaggacggaaagaccccatggagctttactgtagcttgacattgggtcttggtactacatgtacaggataggtgggaggctttgaaaccaggacgccagttttggcggagccatccttgggataccacccttgtagtactgggactctaaccataggccatgaatctggtcttgggacactgtcaggtgggcagtttgactggggcggtcgcctcccaaaaggtaacggaggcgctcaaaggttctctcagtacggtcggaaatcgtacgtagagtgtaaaggcaaaagagagcttgattgcaagacatacaggtcgagcaaggatgaaaatcggacttagtgatccggtggttctgcgtggaagggccatcgctcaacggataaaagctaccctggggataacaggcttatctcccccaagagtccacatcgacggggaggtttggcacctcgatgtcggctcatcacatcctggggctgtagtaggtcccaagggttgggctgttcgcccattaaagtggtacgcgagctgggttcagaacgtcgtgagacagttcggtccctatccgtcgcaggcgtaggaaatttgagaagacctgtccttagtacgagaggaccgggatggacgtacctctggtgtaccagttgtcctgccaagggcatggctgggtagctatgtacggaatggataagcgctgaaagcatctaagcgcgaagccaacttcaagataagatttcccaccgcaagggtaagactccagaaagactatctggttgataggtcgaaggtgtaagtgcagcaatgtatttagcttatcgatactaataggtcgaggacttgaccaatatttatttgatgttcattcattaagatatatgtgtagtttttagagtgctaactctaaagaaactagtattactaggttctataaacttattaaaaacttaatagaaatattaagcataaagattatgtggttacaatagcagagaggatacacctgttcccattccgaacacagaagttaagctctctagcgctgatggtacttggtgggaaactgcctgggagagtaggacgtagccacgtaatttttttgttataataaatttagaatttaacttatatagtttaatttgataatttgatgaaaaaaataaaagacttactgatttttaaatctataggtcttttattttttatctaacatttaaattaagttgttgaatatatcttatattacttactttatatattaattaccattaatacattatatctaattactattcatctaaattattatgccattattttatatacaaattcttttaatttgtctaatccagataaaaaagtattttcactgcaagcataggatatacgaatatatttatccataccaaatgctatgccaggaacaactgcaacattatattcttctaaaaattgattacaaaattctatagaaaaactatctttatattcaaatttctcagatactttagaaagatctataaatatatagaatgcgccatttggattcacatatcctacattatcaatagagtctagttttgatttaattaaatctcttcttgatttatatgttttaaccatattgtctatgtcaattgagcaatctttcaaggctccataggctatgtattgtgctgttagacttgggtgagatataagatgtccttgtatagaactcattgctttagcaatcgttttattagatgcagtatatcctaatcttaatccagtcattgcagctgacttagaaaaaccatttatagttattgttatatctttagcttcttcgcttaatgatgcaattgatgtaaattcaccagtgtagcatattttttcatatatttcatctgctaaaatatatattttattttgtatgcatacatctactatttctattaattcatcttttgtataaacactaccagtaggatttgaaggattgtttattacaagaatttttgttttatctgttatagatttttcaagttcttcttttgttaacttaaatccattttcttttttagtatcaataaaaactggaacagcattaactaacttaatcatttcaggataactaacccaataaggctttggtaataagacttcatctccttcgtctgttaaagctagtaaagtatttgttattgagttttttgctccacttgatacaactatttcgtctattgaatagttacagttattttcttcaataagttttttacagatttcctctctaagtatttttaatcctggaactaaatcatatttagtgtaatctttatttaaagaatcaataccataagattttgcgttattaggtacattaaaatcgggttctcctatactaagatttattactttaactccattactttccatttctttaactttagaactaatacctattgtgtaggatggtgttataaagtttagtctttttgataacataaaatgcctccttttaaattattatttatattatacgacaaatttaaagaatttacataaggaaatttgtagatatatacattaatatatataatagcctacactttttgcctaaaattagtgtaaaaaaaagagaaaaaaattttaactttcaaagttgttagaaacgctactgttcaaaatatccacatagtatttgcaatgatttgcgcaagtttgactattatgtacaaatttggtaatcttaatatagcaattattaagataatccctttaacttagttgaaggggatttttttagacttaacatactacatatagtggtattgggattaataaaatacaatatatagtaacaggaggtttttttaattggttgaattcgtaaaaaaaagagatggaagagtaattccatttaatgaagatagaataacaagagctatatttttagcagcaacgaatgttgcagaaagagaaggaatagtacctgattataaattatctgagcaattaactcaagaagtaataaagtttttaaatcataaatactcagaatcagttccaagtgttgaagatatacaagattctgtagttaaggttcttatagaaactggccatgcaaaaactagtgaagaatatataatatacagaactgaaagaagtagaataagaaattcaaaaacaagattgatgaaggcaatagaggaaattacctttgaagatgcagaagatgctgatataaaaagagaaaatgcaaatattaatggtaatacagcaatgggaactatgttacaatatggaagcactgtatctaaagaattttgtaaaacacatatattaaaaccagaacattcttttgctcatgataatggagatatacacatacatgatatggattttttaaatatgggaacattaacttgttgtcaaatagatgttaaaaaactattcaatggtggattttcaacaggacatggctttttaagagagccacaagatataataagttatggtgcattagctgcaattgctatacaaagcaatcaaaacgatcaacatggaggtcaaagtataccatttttcgattatggattggctgaaggtgtatataagacatttaagaaattctacataggaaatttagctaaagcattgaagttatttaaaggaattgaaaataatgatgtgataaagaacatagtatataatacagagaaagaaacaaatcaaaaagttggtcttaagagagatgaattgtatctaaacttagaaaaagagaaattaatacagacttttgatatagatgatgaacttgtaaataagatgcaaaactttgcatttgaagaatcgtatagagaaactgataaaaaaacatatcaatctatggaagcatttatacacaatctaaatacaatgcactctagagcaggtgcacaggtaccattttcaagtgtaaacttcggaacagatacttctgaagaaggaagaatggtaactaagaatcttctattatctcaagaaagaggtttaggtaatggagagacaccaatttttccaattttaatatttaaggtcaaagaaggcataaatttaaatcctgaagaccctaattatgatttatttaaattatcatgcagagtatcagctaaaagactatttcctaattttagttttttagatgcgccttttaatgcaaaatattataaaaaaggtgaaccagatacagaggctacatatatgggttgtagaacaagagtacttagtaatgtgtgtggttcagaaacagttagtggtagaggaaacatatcttttactacagtaaatttaccaagattgggtataaaacatggtattataaataatgaaaaggctaatttagatggtttctttgaagaattagatgagaagataaacttaattatagaacaattattggagcgctttgaggttcaaggaaataaaaagatgaagaattttccattcttaatggggcaaggtgtatggaaaggttctgatgatttagtaccagaagatacactaaaagaagtaataaaacaaggaacattgacaattggatttataggtttagcagagtgccttattgctcttataggtaaacatcatggagaaagtaaagaagctcaagaattaggattaaaaatagtgtcacatatgagacataaaatggatgaagcaacggacaaatataaattaaatttctccttaatgggtactccagcagaaggtctttcaggtaggtttactaaaatagataaaaaagtttatggagaaattaaaggtatcacagataaagaatattatactaattcattccatgtaccagtttattacaatataagtgcatatgataaaattgagatagaagctccataccatgaattgactaatgcaggtcatataacatatgtagagttagatggagatccatctgataatttagaggcttttgaaactgttataaaagctatgaaagatttgggtataggatatggaagtataaatcatcctgtagatagagacccaatatgcggtttttcaggtgtaataacaagtaatatatgccctgtatgtggaagaaatgaagatgaaagtgacatcaaattcgaaagaataagaagaataacaggatacttagttggtacagttgatagatttaataatgctaaaaaagcagaagtaagagatagagtaaaacatagatagttttatttgggggaataagttatgaaaataagaatgtcatctactataagttatgacagcatagttgatggaccaggattaagaatggtaatatggactcaaggatgtattcataattgtaaagagtgccataatcctcagacacatgatttatgtggaggattttatatggatacagaagaaattataaataaagtcaaatcattgaaattacaaaaaggcattacgctatcaggaggagaaccatttttacaaccagaaccattagaagaaatagcaagagaagctaaaataaatgggttagatgtatggtcatatactggatttacgtttgaacaactgttagataaaaaaaatagagcgtattttaaaaatttaaatttactaaagcaaattgatattttagtggatggaaaatttatagctgaaaaaaaagatataagcttaaagtttagagggtcatcaaatcaaaggataattgatgttcaaaaaagtttgaaatataaaaaagtgtttttggttgagcaatatatgaaggatgatttatctatagcagaataaaatataaataaacaggattaaatatatgcatatatttaatcctgtttattttcatataatatttcaagtttgtataatgtaacaattaaaccaaaagactcattgtatatttgaaattaagttttttatagtttataggtgttttatgtggattacgaatgatatagtatcgatacattatttaatcgattcttattccaagaaacaattaatttatagaaattcttaattgttacaatataaatatctagataagttataagatactgataaataatttataaagtttattaatctaatattgtgtgtgaatgttaagtggtcaagtagtctaaaaaatgaaaaagatttaaaaaagtgttttaactaaacacataagtgttaaattcatgtataagtataggttagatacataagaaataattatgtaatatctatctttgtaaaaaaatattaaattttgtaatttgtggataaatatgtttataatgtggataatatttaatgtaataagttaaagcaatatgaatcaactgtttataatgtggataatattataaatgtatgaataattgcagtatttaaaaacaaaaaaagttaaaaaagttgttgactctaaaagaaaaagttggtatagtaatacttgtcctcaagaaaagggcaaacaaataaagcataaagaactttgaaaattaaacagtaggttaatttataaaacaagaaacaaaccataaagccagatattttgataacaatagtatctgagcctgataaacttttatttgagagtttgatcctggctcaggatgaacgctggcggcgtgcctaacacatgcaagttgagcgatttacttcggtaaagagcggcggacgggtgagtaacgcgtgggtaacctaccctgtacacacggataacataccgaaaggtatgctaatacgggataatatatttgagaggcatctcttgaatatcaaaggtgagccagtacaggatggacccgcgtctgattagctagttggtaaggtaacggcttaccaaggcgacgatcagtagccgacctgagagggtgatcggccacattggaactgagacacggtccaaactcctacgggaggcagcagtggggaatattgcacaatgggcgaaagcctgatgcagcaacgccgcgtgagtgatgaaggccttcgggtcgtaaaactctgtcctcaaggaagataatgacggtacttgaggaggaagccccggctaactacgtgccagcagccgcggtaatacgtagggggctagcgttatccggatttactgggcgtaaagggtgcgtaggcggtctttcaagtcaggagtgaaaggctacggctcaaccgtagtaagctcttgaaactgggagacttgagtgcaggagaggagagtggaattcctagtgtagcggtgaaatgcgtagatattaggaggaacaccagttgcgaaggcggctctctggactgtaactgacgctgaggcacgaaagcgtggggagcaaacaggattagataccctggtagtccacgctgtaaacgatgagtactaggtgtcgggggttacccccttcggtgccgcagctaacgcattaagtactccgcctgggaagtacgctcgcaagagtgaaactcaaaggaattgacggggacccgcacaagtagcggagcatgtggtttaattcgaagcaacgcgaagaaccttacctaagcttgacatcccaatgacatctccttaatcggagagttcccttcggggacattggtgacaggtggtgcatggttgtcgtcagctcgtgtcgtgagatgttgggttaagtcccgcaacgagcgcaacccttgtctttagttgccatcattaagttgggcactctagagagactgccagggataacctggaggaaggtggggatgacgtcaaatcatcatgccccttatgcttagggctacacacgtgctacaatgggtagtacagagggttgccaagccgtaaggtggagctaatcccttaaagctactctcagttcggattgtaggctgaaactcgcctacatgaagctggagttactagtaatcgcagatcagaatgctgcggtgaatgcgttcccgggtcttgtacacaccgcccgtcacaccacgggagttggagacgcccgaagccgattatctaaccttttggaagaagtcgtcgaaggtggaatcaataactggggtgaagtcgtaacaaggtagccgtatcggaaggtgcggctggatcacctcctttctaaggagaattgcctactgtttaattttgaaagttctttacgaactttatatatgggggtgtagctcagttgggagagcacttgccttgcaagcaaggggtcaggagttcgactctcctcatctccaccatttaagagtatattacttaaatctttgatttacttagtagcctcttacaatgcacttatagcttaaatttatacaagctttgtgcgttagcactttaagcaacagaataaactgaacgtatgtgaagtttgtttgttggcgctgtgctttagcactttgaaaactgcatatatatatttagtgatatgacatctaatttgtaatatataaagctgataactttttaaaattatcgaagttgatagcttctaatctatcaaacctttttaactggtcaagttattaagggtgcagggcggatgccttggcactaggagccgatgaaggacgtgataagctgcgataagcttcggggagttgcacgtaaactttgatccgaagatttccgaatgaggaaactcacttagagtaatgtctaagtatcattaagtgaatacatagcttaatgaggggaactcagggaactgaaacatctaagtacctgaaggaagagaaagaaattcgattccgtaagtagcggcgagcgaacgcggattagcccaaaccaataaagttttctttattggggttgcggacatatcataacgaagaggtatcgtaattgaagaggtttggaaagacccaccacagaaggtaatagtcctgtatgttaaacgagaagacttcagatatgatccagagtaccacgggacacgtgaaaccctgtgggaagcaggagggaccaccctccaaggctaaatactacctagtgaccgatagcgtatagtaccgtgagggaaaggtgaaaagaaccccgggaggggagtgaaatagaacctgaaaccctgcacttacaagctgtggaagcacatttcttgtgtgaccgcgtactttttgtagaacgggccaacgagttacgttaagtagcaaggttaagcacttaaggtgcggagccgtagcgaaagcgagttttaactgagcgttcagttacttgacgtagacccgaaaccgggcgacctacccatgagcaggatgaagcgaaagtaaaatttcgtggaggtccgaacccacgagcgttgaaaagctcggggatgacttgtgggtagcggtgaaattccaatcgagcccggagatagctggttctccccgaaatagctttagggctagcctcaaggtgagagatacggaggtagagcactgaatgtcctagggggtattgcacctaccgaagactatcaaactccgaatgccgtcatcttatacttgggagtcagactgtgggtgataagattcatagtcgaaagggcaacagcccagatcgtcagctaaggtccctaaatgtaagttaagtggtaaaggatgtgggattgcacagacaaccaggatgttggcttagaagcagccactcattcaaagagtgcgtaatagctcactggtcgagtgatcctgcgccgaagatttccggggctaaaacttactaccgaagctacggcatcagtaatgatgggtaggggagcttcccatacgggttgaagcatgaccgtaaggacatgtggacagtatgggagtgagaatgttggcatgagtagcgagatgtgggtgagaatcccacaggccgtaaacccaaggtttccaggggaaggttcgtccgccctgggttagtcgggacctaagctgaggccgaaaggcgtaggtgatggacaacaggttgatattcctgtactaccgataaccgtttgagagaagggatgacacagtaggataagctaagcacactgttggttatgtgtgcccaagcattgaggcagtcaaagtaggcaaatccgctttgataatgctgggatgtgatggggagcgaaatttagtagcgaagtagctgatttcacactgtcaagaaaagtctctatcgaggttaaaggtacccgtaccgcaaaccgacacaggtgggtgaggagagtatcctaaggccagcgagagaactgttgttaaggaactcggcaaaatgaccccgtaacttagggataaggggtgccaccatcaggtggccgcagagaataggcccaagcgactgtttaccaaaaacataggtttctgctaagtcgcaagacgatgtataggagctgacgcctgcccggtgctggaaggttaaggggatctgttagagcaatcgaagcagtgaacttaagccccagtaaacggcggccgtaactataacggtcctaaggtagcgaaattccttgtcgggtaagttccgacccgcacgaaaggcgtaacgatttgggcactgtctcaacaacagactcggtgaaattgtaattccggtgaagatgccggatacctgcgacaggacggaaagaccccatggagctttactgtagcttgacattgggtcttggtactacatgtacaggataggtgggaggctttgaaaccaggacgccagttttggcggagccatccttgggataccacccttgtagtactgggactctaaccataggccatgaatctggtcttgggacactgtcaggtgggcagtttgactggggcggtcgcctcccaaaaggtaacggaggcgctcaaaggttctctcagtacggtcggaaatcgtacgtagagtgtaaaggcaaaagagagcttgattgcaagacatacaggtcgagcaaggatgaaaatcggacttagtgatccggtggttctgcgtggaagggccatcgctcaacggataaaagctaccctggggataacaggcttatctcccccaagagtccacatcgacggggaggtttggcacctcgatgtcggctcatcacatcctggggctgtagtaggtcccaagggttgggctgttcgcccattaaagtggtacgcgagctgggttcagaacgtcgtgagacagttcggtccctatccgtcgcaggcgtaggaaatttgagaagacctgtccttagtacgagaggaccgggatggacgtacctctggtgtaccagttgtcctgccaagggcatggctgggtagctatgtacggaatggataagcgctgaaagcatctaagcgcgaagccaacttcaagataagatttcccaccgcaagggtaagaccccagaaagactatctggttgataggtcgaaggtgtaagtgcagcaatgtatttagcttatcgatactaataggtcgaggacttgaccaatattatttgatgtcattcattaagatatatgtgcagtttttagagtgctaaatctatatttttaaacttgtcaaaacttatggatttttaatagttttataaggcaaaaaatcgaataaaaaaagtattgacacaataagacaaagatgttattataatacttgtcttagaaaaaaagttaaatgaaaatttagacaataatctggttataatagcagagaggatacacctgttcccattccgaacacagaagttaagctctctagcgctgatggtacttggtgggaaaccgcctgggagagtaggacatagccaggtaatgtgccgaagtggcggaactggcagacgcacaggacttaaaatcctgcgggacttacctctcgtaccggttcgattccggtcttcggcaccacaaattattgtgggccattagctcagttggttagagcgcccggctcataaccggtaggtctggggttcgagtccctgatggcccaccacaataatttaaagaactttgaaaattaaacagtaggttaatttataaacaagaaacaaaccataaagccagatattttgataacaatagtatctgagcctgataaacttttatttgagagtttgatcctggctcaggatgaacgctggcggcgtgcctaacacatgcaagttgagcgatttacttcggtaaagagcggcggacgggtgagtaacgcgtgggtaacctaccctgtacacacggataacataccgaaaggtatgctaatacgggataatatatttgagaggcatctcttgaatatcaaaggtgagccagtacaggatggacccgcgtctgattagctagttggtaaggtaacggcttaccaaggcgacgatcagtagccgacctgagagggtgatcggccacattggaactgagacacggtccaaactcctacgggaggcagcagtggggaatattgcacaatgggcgaaagcctgatgcagcaacgccgcgtgagtgatgaaggccttcgggtcgtaaaactctgtcctcaaggaagataatgacggtacttgaggaggaagccccggctaactacgtgccagcagccgcggtaatacgtagggggctagcgttatccggatttactgggcgtaaagggtgcgtaggcggtctttcaagtcaggagtgaaaggctacggctcaaccgtagtaagctcttgaaactgggagacttgagtgcaggagaggagagtggaattcctagtgtagcggtgaaatgcgtagatattaggaggaacaccagttgcgaaggcggctctctggactgtaactgacgctgaggcacgaaagcgtggggagcaaacaggattagataccctggtagtccacgctgtaaacgatgagtactaggtgtcgggggttacccccttcggtgccgcagctaacgcattaagtactccgcctgggaagtacgctcgcaagagtgaaactcaaaggaattgacggggacccgcacaagtagcggagcatgtggtttaattcgaagcaacgcgaagaaccttacctaagcttgacatcccaatgacatctccttaatcggagagttcccttcggggacattggtgacaggtggtgcatggttgtcgtcagctcgtgtcgtgagatgttgggttaagtcccgcaacgagcgcaacccttgtctttagttgccatcattaagttgggcactctagagagactgccagggataacctggaggaaggtggggatgacgtcaaatcatcatgccccttatgcttagggctacacacgtgctacaatgggtagtacagagggttgccaagccgtaaggtggagctaatcccttaaagctactctcagttcggattgtaggctgaaactcgcctacatgaagctggagttactagtaatcgcagatcagaatgctgcggtgaatgcgttcccgggtcttgtacacaccgcccgtcacaccacgggagttggagacgcccgaagccgattatctaaccttttggaagaagtcgtcgaaggtggaatcaataactggggtgaagtcgtaacaaggtagccgtatcggaaggtgcggctggatcacctcctttctaaggagaattgcctactgtttaattttgaaagttctttacgaactttatatatgggggtgtagctcagttgggagagcacttgccttgcaagcaaggggtcaggagttcgactctcctcatctccaccatttaagagtatattacttaaatctttgatttacttagtagcctcttacaatgcacttatagcttaaatttatacaagctttgtgcgttagcactttaagcaacagaataaactgagcgcatgtgaagtttgtttgttggcgctgtgctttagcacttttagtaacggaataatctgagtgaatacgaaggttgttcgttgacgtggtgcgttagcactttaagcaacggaatttattcgttggcgccgcgctttagcactttgaaaactgcatatatatttagtgatatgacatctaatttgtaatatataaagctgataactttttaaaattatcgaagttgatagcttctaatctatcaaacctttttaactggtcaagttattaagggtgcagggcggatgccttggcactaggagccgatgaaggacgtgataagctgcgataagcttcggggagttgcacgtaaactttgatccgaagatttccgaatgaggaaactcacttagagtaatgtctaagtatcattaagtgaatacatagcttaatgaggggaactcagggaactgaaacatctaagtacctgaaggaagagaaagaaattcgattccgtaagtagcggcgagcgaacgcggattagcccaaaccaataaagttttctttattggggttgcggacatatcataacgaagaggtatcgtaattgaagaggtttggaaagacccaccacagaaggtaatagtcctgtatgttaaacgagaagacttcagatatgatccagagtaccacgggacacgtgaaaccctgtgggaagcaggagggaccaccctccaaggctaaatactacctagtgaccgatagcgtatagtaccgtgagggaaaggtgaaaagaaccccgggaggggagtgaaatagaacctgaaaccctgcacttacaagctgtggaagcacatttcttgtgtgaccgcgtactttttgtagaacgggccaacgagttacgttaagtagcaaggttaagcacttaaggtgcggagccgtagcgaaagcgagttttaactgagcgttcagttacttgacgtagacccgaaaccgggcgacctacccatgagcaggatgaagcgaaagtaaaatttcgtggaggtccgaacccacgagcgttgaaaagctcggggatgacttgtgggtagcggtgaaattccaatcgagcccggagatagctggttctccccgaaatagctttagggctagcctcaaggtgagagatacggaggtagagcactgaatgtcctagggggtattgcacctaccgaagactatcaaactccgaatgccgtcatcttatacttgggagtcagactgtgggtgataagattcatagtcgaaagggcaacagcccagatcgtcagctaaggtccctaaatgtaagttaagtggtaaaggatgtgggattgcacagacaaccaggatgttggcttagaagcagccactcattcaaagagtgcgtaatagctcactggtcgagtgatcctgcgccgaagatttccggggctaaaacttactaccgaagctacggcatcagtaatgatgggtaggggagcttcccatacgggttgaagcatgaccgtaaggacatgtggacagtatgggagtgagaatgttggcatgagtagcgagatgtgggtgagaatcccacaggccgtaaacccaaggtttccaggggaaggttcgtccgccctgggttagtcgggacctaagctgaggccgaaaggcgtaggtgatggacaacaggttgatattcctgtactaccgataaccgtttgagagaagggatgacacagtaggataagctaagcacactgttggttatgtgtgcccaagcattgaggcagtcaaagtaggcaaatccgctttgataatgctgggatgtgatggggagcgaaatttagtagcgaagtagctgatttcacactgtcaagaaaagtctctatcgaggttaaaggtacccgtaccgcaaaccgacacaggtgggtgaggagagtatcctaaggccagcgagagaactgttgttaaggaactcggcaaaatgaccccgtaacttagggataaggggtgccaccatcaggtggccgcagagaataggcccaagcgactgtttaccaaaaacataggtttctgctaagtcgcaagacgatgtataggagctgacgcctgcccggtgctggaaggttaaggggatctgttagagcaatcgaagcagtgaacttaagccccagtaaacggcggccgtaactataacggtcctaaggtagcgaaattccttgtcgggtaagttccgacccgcacgaaaggcgtaacgatttgggcactgtctcaacaacagactcggtgaaattgtaattccggtgaagatgccggatacctgcgacaggacggaaagaccccatggagctttactgtagcttgacattgggtcttggtactacatgtacaggataggtgggaggctttgaaaccaggacgccagttttggcggagccatccttgggataccacccttgtagtactgggactctaaccataggccatgaatctggtcttgggacactgtcaggtgggcagtttgactggggcggtcgcctcccaaaaggtaacggaggcgctcaaaggttctctcagtacggtcggaaatcgtacgtagagtgtaaaggcaaaagagagcttgattgcaagacatacaggtcgagcaaggatgaaaatcggacttagtgatccggtggttctgcgtggaagggccatcgctcaacggataaaagctaccctggggataacaggcttatctcccccaagagtccacatcgacggggaggtttggcacctcgatgtcggctcatcacatcctggggctgtagtaggtcccaagggttgggctgttcgcccattaaagtggtacgcgagctgggttcagaacgtcgtgagacagttcggtccctatccgtcgcaggcgtaggaaatttgagaagacctgtccttagtacgagaggaccgggatggacgtacctctggtgtaccagttgtcctgccaagggcatggctgggtagctatgtacggaatggataagcgctgaaagcatctaagcgcgaagccaacttcaagataagatttcccaccgcaagggtaagaccccagaaagactatctggttgataggtcgaaggtgtaagtgcagcaatgtatttagcttatcgatactaataggtcgaggacttgaccaatatttatttgatgttcattgattaagatatatgtgtagtttttagagtgctaactctaaagaaactagtattgctaggttctataaacttattaaaaacttaatagaaatattaagcataaagattatgtggttacaatagcagagaggatacacctgttcccattccgaacacagaagttaagctctctagcgctgatggtacttggtgggaaactgcctgggagagtaggacgtagccacgttaaatgttccaaggtagctcaacggtggagcaaccggctgttaaccggtaggctgtgggttcgagccccacccttggagccaaaaaagccgaagtggcggaactggcagacgcacaggacttaaaatcctgcgggacttacctctcgtaccggttcgattccggtcttcggcacttataaaacaatatcgcggggtggagcagttggcagctcgtcgggctcataacccgaaggtcgtaggttcaagtcctgcctccgcaaccattaaaacggctcgttggtcaagaggttaagacaccgccctttcacggcggtaacaggggttcaattcccctacgagtcaccaattcaattaaatatgcgggtgtagctcaatggtagagttctggccttccaagccagctgtgagggttcgatccccttcacccgctccaaaaatgggaccatagctcagctgggagagcacctgccttacaagcagggggtcacaggttcgagccctgttggtcccaccattcgcggcctggtagttcagttggttagaatgccagcctgtcacgctggaggtcgagggttcgagccccttccaggtcgccaaattaaataagcgggaatagttcagtggtagagcgcaaccttgccaaggttgaagtcgcgagttcgaatctcgtttcccgctccataataacttgggtgcatagctcagctggatagagcaacgcccttctaaggcgtgtgtccggggttcgaatccctgtgcgctcattaagaaaagtttactataaattatagtaaacttttatattgtttaaaaagacacaggaaacatgtatattacctgtgtctttttatttataaactttaaactatgtaaaaattacagtatattctaatagagttacagtatattcattaatattgtaaacatacggagggtaatgtataatagtctacaagatgtttatgaaggcatcagttaaatataactaattagataagagttatatacattatattgtatactttatggtatttatatattgaaataacttatgaaattatttataaagagatttatgagcatatttttgtctaaacaataagtataagaaattataaaaaattagagactatagtgaattgacaatttaatgtaatatttataagttatactaagtaaattattatactgtgaaatggatatataactttaggtattgtgtattattttcactgtaggagattatatctagttatacataataagttttaatgatagtttatagtaagatattaaaataaatttatctaatctagatatgaaataagttattactttaatataaaaatgaatctaatggaataatattgatgataagtaatatttagattttgtatttgtttatagttaataagtggattatagaatttataataattaatatatattaaacaaagatatattaagatattttagaacataaaactgcattaaggcgcgagtactattttgtattcgcgccttgatggtttgagttatttgagtaaaaactaactttaataagaaatatgtatttattaagttgatatttttaatgtgtttagagattatttaacaatctccaaatataaaactagaattatttacataaaagttaaatagtttgtatagagttagatttatatagtataatacttagtgtaaataattaagaagttatcaaacaggaggataaaactgtgttagatataaattcttttttaaatggattttttaatataatattaagaatgagtatatatgatttaattgacatatctatagtagcgtatattttttacaaaatatttatgtttataaaagatacaagagcagaacaagtgtttaaaggtataatatttcttttattagcaactcaacttagtaacacctttaaattgcataccgtttattggatatctcttaaagctttagattatggagttatagctgctcttataatttttcaaccagaatttagagcaggacttgaacatataggaagagcaaagtttaatttatttggaaagaatgtaaatacttctgaagaaactctcaatagaaatatagaagaaattgtagaagctttatattcactttctagacaaaaaataggagctcttatcataatggagagagaaactagaataagtgatataataaatacaggaactattattgatgctgaaatttctaggcaactattaataaatatatttataccaaatacaccattacacgatggagctgttgtaattagagattctaaggtaaaagcagctgcatgttttttgccattgacggaaagtaaggatttaagtaaagatttgggtactagacatagagcaggaataggggtaagtgaggtgtctgactgtataactctgattgtatcagaggaaacaggtggcgtatcaattgctaaagcaggtaagttatatagagatatttctagagaaagaatgatgaatatattacgtagtaatttaaaaacaaatacagaaacaagaagttttttcaaaggtggtatatttaaatgataaatagactaaaaaataataccaaaataaaaataatatcatttttaagtgcaattgcattatggatgtatgttatggctgtagttgaccctgaagaaactaaagggtttgaagatatacctgtatctataagtaatatgagtgatttaaaggataaaaatcttgttatatatccagacgaaaaattaacagcagatgtatatataaaaggtagtttatcaaaggtacaaagtgttaagaaagaagatatacatgtatatggaaccattgaagacccaatacaaggacagaaggaagtatatttaaaagcaaatattcctcaaggtgttactctagaatttaagcatgatgttttagtagtaaatcttgaaaaaaacataaaagaaaaaagagatataaaggtagaagtaagtggaaattcaaaaagaaatataaataaaattgaacttagtaaggaatttgtcgatgtatcaggtccaagaactctagttaaagaagtcaaaagtgtaagagctaatctagatgttggtaatgagacagatgatttttctaaaaaattgcaattaataccattaaatagtgatggaactaaggttgaaggagtaacattaagttcatcctttgtgactgcaaagatagaactattgaaggaaaaaattgtcccaataagagtaagtctaaatgataataaagataatgatgtactgaaaaactataaattaagtaaggaacaagttacaataaaaggaaagaaagaagatatagacaaaataagttatattaagacaaaacctattgacttagctgatttggctaatggtgaagaaaaagaagttagcttagaaattccagagggtataactcttgaggatagctctataacaattaaattaaatgatacaaaacaattgagtgcagaatttttatataatgcgggagatattgaattaagaaatatcccaacaaatatagataatccaaatgtaatttctgatgtagatataaaagttgttgtagagtcaacggaggatttgagtaagttaaataaaaaagatatttcattatatattgatttatcacaaggccctgaggaagatagtaaatataaaataaaatatgaaacaacatatcaatttaaaaaaataaatatagaacctaatattgttgaagtggaatgaacaaatatttcgaatatttagttgttacaagatgcgacaaaaaaacctataaaattaagtttgttaattttatgtttttgttgcatcttgtttattttagttatattataaaataaggacaatgagatatttgttaaatctaaaaagcgctagatatatgaaaaaagactgataaatagatttaaataaatattttgaattaaatatttcaattatctctaggaaaacgttgctgaacgagttataatttaattgagatataaaaagttctatttcaaaaaattcaagatgaggtggaaatgcatgagaagttttgaagaagtaattaagtttgcaaaagaaagaggacctaaaactatatcagtagcatgttgccaagataaagaagttttaatggcagttgaaatggctagaaaagaaaaaatagcaaatgccattttagtaggagatatagaaaagactaaagaaattgcaaaaagcatagacatggatatcgaaaattatgaactgatagatataaaagatttagcagaagcatctctaaaatctgttgaattagtttcacaaggaaaagccgacatggtaatgaaaggcttagtagacacatcaataatactaaaagcagttttaaataaagaagtaggtcttagaactggaaatgtattaagtcacgtagcagtatttgatgtagagggatatgatagattatttttcgtaactgacgcagctatgaacttagctcctgatacaaatactaaaaagcaaatcatagaaaatgcttgcacagtagcacattcattagatataagtgaaccaaaagttgctgcaatatgcgcaaaagaaaaagtaaatccaaaaatgaaagatacagttgaagctaaagaactagaagaaatgtatgaaagaggagaaatcaaaggttgtatggttggtggaccttttgcaattgataatgcagtatctttagaagcagctaaacataaaggtataaatcatcctgtagcaggaagagctgatatattattagccccagatattgaaggtggtaacatattatataaagctttagtattcttctcaaaatcaaaaaatgcaggagttatagttggggctaaagcaccaataatattaacttctagagcagacagtgaagaaactaaactaaactcaatagctttaggtgttttaatggcagcaaaggcataattttaagggggaaataggcaaatgagcaaaatatttaaaatcttaacaataaatcctggttcgacatcaactaaaatagctgtatttgataatgaggatttagtatttgaaaaaactttaagacattcttcagaagaaataggaaaatatgagaaggtgtctgaccaatttgaatttcgtaaacaagtaatagaagaagctctaaaagaaggtggagtaaaaacatctgaattagatgctgtagtaggtagaggaggacttcttaaacctataaaaggtggtacttattcagtaagtgctgctatgattgaagatttaaaagtgggagttttaggagaacacgcttcaaatctaggtggaataatagcaaaacaaataggtgaagaagtaaatgttccttcatacatagtagaccctgttgttgtagatgaattagaagatgttgctagaatttctggtatgcctgaaataagtagagcaagtgtagtacatgctttaaatcaaaaggcaatagcaagaagatatgctagagaaataaacaagaaatatgaagatataaatcttatagttgcacacatgggtggaggagtttctgttggagctcataaaaatggtaaaatagtagatgttgcaaacgcattagatggagaaggacctttctctccagaaagaagtggtggactaccagtaggtgcattagtaaaaatgtgctttagtggaaaatatactcaagatgaaattaaaaagaaaataaaaggtaatggcggattagttgcatacttaaacactaatgatgctagagaagttgaagaaagaattgaagctggcgatgaaaaagctaaattagtatatgaagctatggcatatcaaatctctaaagaaataggagctagtgctgcagttcttaagggagatgtaaaagcaatattattaactggtggaatcgcatattcaaaaatgtttacagaaatgattgcagatagagttaaatttatagcagatgtaaaagtttatccaggtgaagatgaaatgattgcattagctcaaggtggacttagagttttaactggtgaagaagaggctcaagtttatgataactaatgataaaagaataagaatcataactggtcactatggaagtggtaaaagtgaatttgcgatgaactatgttgttaagttaagagatatggtttctggcaaagttgctatagccgatttagatgtggtaaatgtatactttagaactagagaaaagaaagagttaatgaaatccttaggtatacaaccaatagatagctcaattaatgctccaacattagatttaccagcagtatcagcagaggtaatgtctcctatggtagaccattcatacaattctgttatagatttaggtggagataatgtaggtgctagggttataggaagatttagtcatttgttaaaagaaggcgattatgatatgctttttgtaataaatgcaaatagggagaaaactcaaacttctgaagaagttatccaatatataaaagaaatagaaaaatcttctaaattaaaggtaacaggtctaattaataatactcatcttattaggtttactactattgatgatgttttaagaggtcagaaagttgcaaaagaagtttctgaaaaatgtaatataccgataagatatgttgcatgtttagaaaatcttgttgaacagttaccaaaagatttagaaggagaaatttttcctataaaattatatatgagagaagactggatgtagtttgagctcaaatatatagaaagtttaaggaggcttaggtaaatggctaaaggaaaagtatcttttaatcaagaacgttgtaaaggttgtggattgtgtgttgaagcatgtccagtaaaaatcatacaattagactcaaatgtaataaacaaaaaagggtataacccagcaactgtttttgaaatggaaaaatgcataggatgtgcaagttgtgcaactatgtgtccagatgtagttataacagtagaaagagattaatttaattaatatttaagggggaattttaatggctaagatacttatgaaaggtaacgaagcatttggaaaagcagctatagaagctggttgcaaatatttcttcggttacccaataactccacaaagtgaattaccagaatatttatcaagagagttacctaaaataggtggagcgttcgttcaagctgaatcagaagtttctgcgataaacatggtttatggtggagcaggtgcaggagcaagagttatgacttcttcatcttcaccaggagttgctttaaagcaagaaggtataacatatgcagtaggagcagaagttccttgtgttgtacttaatgtaatgagaggtggtccaggacttggaagtatacaaccttcacaagctgactactttatgtctacaagaggtggaggaaatggagactacagaactccagtattcgcaccagctacagttcaagaagctgttgatatgataatggaagcttttgacgttgcagattattacagatcaccagttatggtagttgcagatggtatgataggtcaaatgatggagccagttgaatttagagctcctgagaagaaaagagaattgcctcctaaagattgggcaactgttggaactaaaggaaaaagaaaacctaatgtaataaactctctatacttagaaccagaagtactagaagaccattgttggcatttacaagaaaaatttgatgcaatggaaaagaatgaagtacaatacgaaatgtacaaaacagaagatgctgaatttgtatttgcagcttatggaactacttcaagagtagtaaaaagcgcaattgatatattaagagaagaaggaataaaagcaggtcttataagacctaaagtattatggccattcccattcgaagcattcaaccaaattcctaatgctagaaacatattgactgttgaaatgagtatgggacaaatggtggaagatgttaaaatggcagtagaaggtaaattaccagtttacttccatggaagaccaggaggaatgactccaacaccagcagaaatagttgaaaaagctaaaaaaattattgccggagaattggttgcaggaggtgctagataatggctgttgtatttaagaaaactgaaggattacaagatactcaaactcactactgtccaggatgtacacatggtataatccatagattagttggtgaagtattagaagaactaggagtattaggtgatgctgtaggtgttgttccagttggatgttcagttttaggatataaatattttaactgtgacactcaagaagctgctcatggtagagcgccagctgctgctacaggaataaaaagagttcatcctgaaaatacagtattcacttatcaaggtgatggagacttagcttcaattggtactgctgaaatagttcatgcagctgctagaggagaaaaaataactactatatttgtaaacaatacaacttatggtatgactggtggacaaatggctccaactacattagttggacaaagagctactactgctcaatcaggaagaaatgctgaaactcaaggttatccaataagagtaagtgaaatgttagctacattaacaggagctgtatttgtagaaagagtagcagttgatactccagctcatgttagacaagctaaaaaagctataaagaaagcattccaagttcaacaagcaggattaggatttggaatagtagaagtattatctacttgtcctacaaactggggactagctccaaacgatgctttacaatggttaagagacaacatgataccatactatccattaggaaatttcaaaaatgttgaagttgaggaggtgaagtaaatgtctacagctagagtaatatgtgcaggcttcggaggccaaggtgttatgtctatgggacaattacttacttatgcaggaatgctagaaggaaaagaagtttcttggttaccatcttatggaccagaaatgcgtggaggtacagcaaactgtgcagtaactgtatctaatgagccagttggttctccacttataacagatgatgcaactgcagctatattattaaatataccagcatttgaaaaattcaaagatgatgttattcctggtggaaaaataatagtaaatagttctttaataaaagaaaaagttgatagaacagatgtagatgtttattatataccagcaaatgaattagcagctgaattaggaaatgataaagttgctaatatgataatgttaggcgcttacttaaaagtatctgatactgtagatatagaatctgtactagaagcattcaaaaaagttttcggacctagaaaagaaaaattcgttccattaaacagagaagctttacaaaaaggtatggatgctacatgttctaaagcaactaactaataaagaaaaagatgtcaaaaaaaagacaatagaattatttctattgtcttttttgctgataagtattaaaatgtttttatgactgaaattaagcctataatgatattttatgaactataaaaatataatacaaattacaagcttttcaattatgaaaggagaatctttagtgagaaagtattttggaacagatggagttagaggagtagcaaatacagaactaacatgtgatttagcatataaacttggtagagctggtggatttgtcttagctcaaggagaccacagagtaaaagtagtagtaggtaaggatactagaatatcaggtgatatgttggaagcatctttaatagcaggacttatgtctgttggatgtgatgttattactgttggaataataccaacacctgcagtggcatatttaactagaaaatatggtgctgattgtggtgtggttatatctgcatctcacaatcctgttgaatataatggaatcaaattctttaataagaatggatataaattagatgatgaaattgaattgaaaatagaagaatatatagacgatatagacaaaattgattgtcttccaattggtgaaaatgtaggaagaaaattacatgaacattgtgcacaaagagactatgtagactacctaaaatcaataataagcactgactttaagggattaaaagtagttttggactgtgctaatggtgcgtcatataaagtggcaccaatagtgtttgatgaactaggagcaagtgtaatttcaataaatagttcaccagatggaaataatataaactataaatgtggctctacacatccagaacaacttcaaagggctgttttggaacataatgctgacttaggtcttgcatatgatggagatgctgatagattaattgcagtaaatgaaaagggtcaaattgttgatggagaccatataatgatattgagtgccttaaatttaaagaaaaataataaattggcgcaagatactttggtagttacagttatgagtaatatagggttgacaatagctgctaaggaaaatggaataaatttatctactacagcagttggagacagatatgttttagaagatatggttaaaaatggatataatcttggtggagagcaatctggacatatgatatttttagattacaacactactggagatggagtgcttagttctctaatacttgcaaatataatcttgcaagaaaagaaacctttatcagaaattgcatcaataatgagccaatacccacaagtattagtaaatgcaacaataaaaaatgaaaataagaacaaatatatggaatatccagaaataaaaactgagatagaaagaatagaatctattttaaacggaaatggtagagttttgataagaccatcaggaactgagccattagttagagttatgttagagggtaaagaggaaggtcaaataaaagaattagcaacaaacttagctaatcttatacaagaaaaattatcgtaatttaaagggtattctcagatacaaatactgaggacacctttctaagcgccagaacttagttatagacataattattgagtaatataggaactaagttgacgaggtcagagttaatcgaattgtcggcggatgctctgcggtgtgtttaccatcgaaagacttctttaaataataggagcaatcctatggacaaagggaagccaaagtaaacttatatgacctaactcttaaaatatataaataatatttttaggaggacacaaataatgtgtggaatagttggatatttaggaagtagaaaggcagcagaagttatagtagaagggctttctaagctagagtacagaggttatgactcagcaggagtagcagttaatagttctaatgaagaagaacttaatattagaaagtttaaaggtagactttctgtacttgcagaagacttagaaaagaatcctattgatggaaatttaggtatagggcatacgagatgggcaactcatggagaaccatctgatgtaaactcacatcctcattttaatcaagccaaaacaatagcagttgttcataatgggataatagaaaactatatggaaataaaagaagaattaatttctgaaggtgttaagtttgaatctcaaacagatacagaggtaatagcacatttagtagataaatactatgagggtaatttattagatgctgtatacaaaactatatcaaaattaagaggagcttatgcattaggtgttatatgtaaagaacatggaaatgaattagttgcagtaagaaaagatagtcctcttgtagttggtgttggtgaaggtgaaaactttatagcatcagatatacctgcattattaaaatatactagagatgtttatttcttagaaaatggagaagtagttcatctaaaagacgaaaatgtaacagtttatgactctaatagaaatcttgttgaaaaagaagtatttcatgtaacttgggatgtagaagctgcgtctaaaggtggatatgactactttatgtcaaaagaaattcatgagcaaccaacaggagttagagaaactttagaaagaagacttgatgataatggaaatataattctagacagtataaatatttctaaagaagacttagaaaaaataaataaagtttatatagtggcttgtggaacagcatataatgctggattacttggtaagtatgccatagaaaaatttgtaaatataccagtaataactgatatagcatcagaatttagatatagcgacccatttgtagatgaaaattcattagtaatattagttagccaatctggtgagacagcagatactctagcagtattaagagattcaaaggctaaaggagcaagaatactttcaataactaacgttgtaggttcatctatagcaagagaatcagatgatgtattctatacttgggcaggacctgaagtagcagttgcatcaactaaggcatatactactcaaataacttctttatacatgatagctttagactttgctatcaaaaaaggaacaataactagagaattttatgatagtatgatttctaagatgaaagaaataccatcaaaaatacaagaaatattagacaatgaagaatatataaaagaagttgctaaaacagttgttagttctgaacatgcattctatttaggaagaggtatagactatagcttagcaatggaaggttcattgaaattaaaagagatttcatatatacatgcagaagcttttgcagcaggagagctaaagcatggaacaatagctttaatagaaaaaggaactcctgtaattgccatagctactcaagaaaagttatttgaaaaaatggtttctaatatggaagaagtaagagcaagaggagcttatgtagtagcaatagctcaaagccataataaggatgttgagaaagctgctgataaaataatctatataccaaattcagatgatattttatcaccaatattagcagttgtaccaatgcaattacttgcgtatcatgtctctgtactaagaggatgcgatgtagataagccaagaaatctagctaaatcagtaacagttgaataaaaacagattaaaaattaaatagataatatttattgaaaaaaactcatcctgttatttgtattttataggatgagttttttagataaatattaaatttgttttgtttttgctataataaattttataaaaagattgatattaaatcatctgtaaaatgataaatatatagaccataccaggtatagggaacgataaatatagttcatataaaatatagtgagtacttaataaacatatagtcaatatcagacataaaaaaataatagcttatgagaaaaattaaaatacaaggtattagtaaccttgtgataagataaagtgagtagtttaaaataagaatataaggaactatttataaaagaatataatgaagctaatagagtataagaaaattactttattttagtaaaataatttcaaataaaaatttttttaaattgggagtataaattatgacaaatgattttaaaaaagaaaagaaagaagattattttgttaatcttaaggcaatatctactgaagttttacaagaaaaaatgcaagataacgcttgggttatagttgatactcgcttaaatgatgcttataatggctggaagttagatggagtaaaaagaggtgggcatataaaaagagcagtagatttttctgctaattggttaaatgtatactcagatagaaaagatgaagtgctagaacaagcattgaaaactaaaagaattgatttagataaaaatatagtattgtatgatgcaaatggaaaagatgctttggttgtagcagattatttatctaaaaaaggatataaatatctatataaatatgatattaaacaatgggcagacgatgaaaatcttccaatggaaagatataaaaattatcaaatgatagttcctgcttttataataaaagatatattagatggaaaaattcctgagacatttgaagattcaaagaatataaaaatgattgaagcgagttggggagaagaatcgtatacaaaagggcatatacctacaagtgttcatgtaaatactgatattatagaacctcctccaacatggatgcttgataatgatgataacttaactaagtttgctttagactatggactaacaaaggatgatactgtaatagtttcaagtattacacctatggcatcttatagactagctgttatattgagatatataggagtaaaagatgtaagagttttgaatggtggaacaaactcatggttatcagcaggatatgaattagaatttattagtaatccaaaacattcatgtactaattttggagcagatataccagttaactcacaattagttgttactacatctgaattaagacaaaaactaaaagaaaaaaataagtttatactagtagataatcgtacttgggatgaacatataggaaaagtatctggatatacatattatgataaaaaagggcgtataccaggagctttatatggacattcaggtagtaatagtgtttcactagaagaatatcgtaatattgataatacaatgagaaataaatctgagattttagaaatgtgggacaaggaaaatatagatgtgaataaacagcttatatttatgtgtggaagtggatggcgtgctgctgaagtattaacatatgcaaatgtcataggagtggaaaatacctccctttatagtgatggatggatgggctggagtcttgataattcaaatttaattgaagtgggagaacacaaataaagtttttgaaagtacaatagagttgtttaaaacaaaggtgtttttgatttattaggaagagtgtgtaaattgtgtattgggaagtgtacttaggtatgttcatttggagctatggaaattgataaaaaagtattatctgtttattttgctggtaaaatatgaatagattatagattatagattatagattatagattatagattatagattatagattatagatttaagtatagactaagtaatttatattacagaagataatatataagaattaatgcaagatgtatttgatacatataaggaattggcaagtccaggagaaggatagagaaaattgagattgaagagtttgaaagagattattagatgaaaaatacaaaaatgtataaaaatacatattgagaaagtatatctctcttaaatttgttaataattctattatacagaaaaacatatttaagggggattttttactatgaaaaaagtaaaattagctataagcttttttatattaatgattataggaatgacaatatcttatgcagatacaagtataaatactagatacaatagattaagtaaagctcttgaaatatcagaagcaaattttaaattttataatgttaaaattaattctgttataaatcataatttatcaaataaagaatttcataatatttttatagaaataattaacaatctaaagttggataaaaaaggaataaattggaatcaaaaagggtctggcgataaaatacaattatgtgctactataaaaggtagcgataaagaaatttctataaaaggaataaataaaaataacaaagaaagttacatagtagttgacatattggataacaaagtatataaacataaagaggttatttatagtaacgtagaaaatgtgttaaataaatattcatctcaagtagatgtgtctgcttgtattgttggagaatacacaaaaaggttacaaaacaacaaatatgatgatattttacaaaaaatattatataatatgagtgctaagcaaatagatgaagttaaagacgtaaactttttatctataacagcatatagtaaagtattaaatgattatgaattagaatatttaggggaaaaaattaatttaaatataggaattaaatataatgaggatgacggaaaaacactcatatatattgccacaccaattataaaattagattattaattatgaggagatcaaaaaatatggctaagataatagtaaaaaagagtaatccacttaaaggtagtgttaaaatagatggtgcaaaaaatgcagttttaccaataatagcagcgactttattagcaaacggaaaatcaacattaaatggagtaccaaatttaagagatgttcatgttatatcagatttattaagacatgtaggagcagaagttgaatataaagaaaatacacttactgttgatgcaagcaatataaaaacttgtgaagctccatatgagcttgtaagaaagatgagagcttcttttttggttatgggaccattgcttgctagatttaatagtacgaaaatttctatgccaggaggatgtgctataggaacaagacctatagatttacatttaaaaggatttaaagccttaggtgcaaagatagaaatggaccatggttttgttgaagcagcaacagaaaagttagtaggaaataaattatatttagatttcccatctgttggagcaactgaaaacataatgatggcagcttctttagcagaagggactacaataatagagaatgcagcagaagagccagaaatagtagatttagcaaacttcttgaacgaaatgggagcagatgttaaaggtgcaggtactaatactataaaaataaaaggtgttaaagagttaaaaggagcagaacataatgtaattccagacagaatagaagcagcaacttatatggttgcagcagctatgacaaaaggtgatataactgttgaaaatgttttaatggagcatttaaaaccagttgtagctaaattaagagaagctggttgcgaaataacagaaatggacaattctgtaagagttgtaggtccaaaagtattaaaaccaatagatataaaaactttaccacatccaggatttcctacagatgttcaagcacaatttatggctatgcttactgtagccaatggaactggtgtagttatagaaactgtttttgaaaatagatttatgcatgttgctgaatttaatagaatgggtgctaatataaaaatagatggaagaagtgcggttgttaatggtgtagatgagctacacggtgcagcagtaaacgctactgatttaagagcgggggcagcccttattttatgcggtcttatagcagaaggagaaactcaaataggagaaatataccatatccaaagaggttatgttgatatagataagaagataacagcactaggtggtcaaatcgaaatagtagaagattaataattggtttatagaagaaagttataaattaatagggttgttcatatacttaaatacaaggttttaaaagctaaggaggagagtatatgaagaacccattggttgttttgttaggatttgtgacttgctctgtgttagttccatcacttataactttagtttcttataaaaatgtagaattaactgaaaaaccagagagcccagtatctataaacaaaactattaaaaaaagtgatattgaagacaaaggtaataaagaagaaaaaagtacagtgagctatgaaactgtaaataaaaaagcaccaattatcaatgtatataatcatataacagggaaaaccgaaaagatggacatggagaactatttatgtggagtactagctggtgagatgtcttcagagtttgatatagaagctttaaaagctcaatctgtagcagctagaacatatgtagtatataaacaggaacatggtaaatctagtaaacataaaaatgcagtagtatgtactgattataaacattgtcaagaatataagagttatgatactcttaaaaaattaaatggtgaagaatggattaagaataaatattccaaaatccaagaagcagttagaggaactaaaggtcaaataataacttataatgataaggcgatacttcctctttatttttctacatcttcaggaaaaacagaaaatagtgaagaagtattttctgcaaaatatccttatttaaagtctgtggaaagtccttatgataagtattcccctaaatttgcgtcaacacttaaaataagtaacacagattttgttaaaagtcttagaagggcatatagcactattgtgatagatgtgaataatttaagtaaacaagtttcaataactaaaagaagtgatgccggaactgtagaaaaaataaaattaggaaataaagaattgactggaaaagacattagaactgtttttaaattgaactctgcaaactttgacataaaatttggagaaggatacatagatttcgtggtaaaaggatatggtcatggtgttggtatgagccagtggggagcagaaggaatggcagaagagggctataaatattatgatatattatcacattactacacagatacaaaaataaaagatatatactaataattgtataaaatgccaaaaacacgtcaataatccaaatgtagaaatatatttggaggtgcaaaatgaagaaaaagctgttagaaaaagatggtttttatttatctttgtttgtatgtgtttgtttattagcagtaggtggagtttggtttacaaataataatgtagataaattggcttctaataaaggaattatggaaaatgctaataaagatagtgaagaggaaatacatttaattgaaaaagacaagaaagatgctatccctactgcaacggattcaaaacaaaacttagaaaaagctaagtcaaaagaggaaaataaatcgagtacaacaaaattaaattacattggagataaagtaataagaggatattcagaaaaagaacctagttattctaaaactcttgatgtttgggaaactcataaaggtgtagatattagttgtactaaaggcaaagaagtaaaatctctattaaacggaatagtagtagatgtatttaatgatgaagaatatgggcaatcagtcaaaataaaaagtgacaataacattgtagtagtatattcaaatctagataaaaatgttagtgttaagaaagaacagaaggtaacagaaggacaatctctaggtactgtaggtagtacttctcaaatagaaagtgaagaaggtatacatgttcatttagaggcgtatagtggagaaaaatctatagacccaatgagtctaattaagtaaaagtataacaagtttaatcatatttggttaagcttgttatattttttggtgtttttacatatatatcattaaagctattatgtgaggggggtaatctttgagatctcatatagaggaaagggccatagtggtagcaaaatatatacttgaaaaaaacactacagtaagacaaaccgccaagacatttggagtaagtaaaagtacaattcataaggatgttacagaaagattgaaggaaataaatccatcccttgccaaagaagttaaaaatgtgctggacaaaaataaatcagagagacatattagagggggattagcaacgaaattaaaatatgagaaggaacataaaaaaatgtaggttaaaaacctactttttttattgaattaaattataaaaagaaatatattaagtaattataaatagcaaaataataatactctcaaaagatttattttctcttgattaaagcgagatttttgtatatgctttattataggagtattaaaataggcttataatataatctaatattataaataaaggagttgaaaaaatggctggagctgatataggcatagatttaggtactgcaaatgtgcttgtttatgttagtggtaagggaatcgttttagaagaaccatctgttgtggcgatagacaaaagaacagattctgttttagctgtgggagaagaagctaaaaagatgatagggagaacaccaggtaatatagtcgctataagacctttaagagatggtgtaatttcagattatgatgtaactgagaagatgttaaaatcttttatagataagatagttgataaaaagggatttggaagattttttatgccaagaattatggtatgtgtaccaacaggtgtcacagaagtggaaaaaagagcagtagaagatgctacgagacaagctggagctagagaagtatatatcatagaagaaccaatagcagctgccataggagctggtgtagacatatcacagcctaatggtaatatgattatagatattggtggaggtactgtagatatagctgtaatatctctaggaggagctgttgtaagtgaatctataaaggttggtggagatagatttgatgatgctatagttaaatatatgaaaaaacaacacaatcttcttataggagaaagaacagcagagaaaatcaagtttgaaataggttctgcatttaagagagaagaagaaaaatatatgaagataacaggaagaaatttaattacaggacttcctagttctataactataaattcaacagaaatgttggaagcacttagagaatgtgttgagcaaatagtagttgctactcatgctgttttggaaaaaacgcctcctgagttagcagcagatataggagatgtcggtataataatgactggaggaggttcattattatatggattagataaaataatagaacagaggacaggaataactgttacaatagcagatgaaccattatcttgtgttgcaaaaggtacaggaatagctttaggttcaatagacttacttgaaactggtgggtctttcaaaagaaaataattaggagagtttagaatgttaaatatagatgaaataaaaaaattaataccacatagatatccatttttattagtagacaagattacagagctagaagttgggaaaagagctgttggtataaagaatgtaacagttaatgaaccatttttccaaggtcactttccagaatatcctttgatgccaggagtactaatagtagaagctctagcacaagtatgtggagtggcaatgatgtctgtagaggaaaacaaaggaaaactaggtgtatttgcaggtatagataaagttagaatcaagagagaagtaagaccaggagatacattaactatggaaattgaaatgacaactcttagaaaaaatatagctaaggcagatgctaaggcatatgtaggtgaagaacttgtctgtaaaggtgaattaatgtttgctttagtagaaaaataaaaacttgaaatataaaagtaaaaaggtagataatttggagtatttaatcagatactctaaaatatctacctttttatataaagaattttatcatttagtttatatttagattaggtggatactaataaagccaaggctattgtttcagctaaatctaatataaagctaaggcgtatattattaaatgaaagtttattattttcatcaattttatctacaattcctactatagaataatttcctatttgaggtagttttttaccaacaccttttccgggcaggataggtccttctctaatctgtatattacctatgttactctgcgaccccaagcaagcatctatagccaagaagttaccttgtatatgtgtattttttatagtatctaaagactcatatatatttaaggcgtgaatagggttatctagtgtaccgtaaacggggtatttaaagttactgttcttaagtattgttccaactaaagggcctaaagtatcacctatagccctgtctgttcctatgcaaacaacaatcgtattttcattaattatagtttttagaactgaacttagcatctgtataacatcatcatcgctgtagtttactttagctaaatacaataggaacacccccttcaaaaaaatatatgaataaaaagcattaaaaagacctaactttaaatttcagatagatagaaaattttatttgtcttacaaaaaaaggaatagaaaaaatatgactaaaaatattgacaaaattttaaaaaaatagtaagctagtaaagtaaaacaaaacttaaatcttgattaccttatcaagagaggctgagggataggccctgtgaagcccagcaaccacccaaatgggaaaaggtgctaattcctacaagacaaaagtcttgaaagatgaggtcagttaattagtatgtaattacgattattaacctcttcttataaaggagaggtttttttattttgagtaaatttctaaaattaaaaataaggtaaaacctataataaaaattaagaataaataagggggaataaaaatggcaagacatttatttacgtcagaatcagttacagaaggacatcctgataagatatgtgaccaaatatcagattcaatattagatgcattattagaaaaagacccacaatctagagtagcttgtgaaactacagttactactggtttagttttagtagcaggagaaataagtacatctgcttatgtagacattcctaaattagtaagagaaacagtaagagaaattggatatacaagagcaaaatatggatttgattgtgatacttgcgcagttataacttctattgatgaacaatctggagatatagctatgggagttgatgaaggtctagaaagtaagactggagaagagatagaagaagaaatagaaaaagttggagctggagaccaaggtataatgtttggatttgcatgtaatgagactccagaattaatgccacttccgatatctttggcacataaattatcaagaaggcttacagaagttagaaaaacaggtttagttgattatttaagaccagatggaaaaactcaagttactgttgaatatgaaggaagtaaagctgtaagagtacatacagttcttatatcagctcaacattgtgaaacagtatcaaatgataaaataagagaagatttaattaatcatgttattaaggaagttataccagcagaattacttgatgaagagactaaaatttatataaatccaacaggaagattcgttataggaggaccacaaggagatacaggtcttacaggaagaaaaataataatagatacttatggtggatattctagacatggtggaggagctttctcaggaaaagaccctacaaaagttgatagatctgctgcttatgcagctagatatgttgcaaaaaatattgttgcggctggtcttgcagacaaatgtgagatagaacttgcatatgctataggtatagctagaccattatctatatttatagatacttttgggacaggcaaggtttcagaagaaaaacttgttgaattagtaaataaacactttgatttaagaccgggagcgataataagagacttagatttaagaaagcctctttataaaaaggttgctgcttatggtcactttggtagaactgatatagatttaccttgggaaagaactgacaaggttgagcagttaagaaaagatgctttaggtgaataatttttaactaaaaagctgttagaatgtaattttacgattactttctaacagtttttttattatgagttaaatatttttaataaatgttaatttatcatcatataatgaataaacagtatttaatctggtcaatacattttatataatactctactaaatttatacatattatgggatatatgttaaaggatggttaagaatgtgttaactaatgttaaataattaaaaatatattgaaatatcacaataatgagtctaatataatcttaataaacttacactttaaaaataattttaattgggggggagtagtgtatgtcaggcaaagtaaatattaaaacggttataagttttgctggagcttatgttgctactgtaataggttctggatttgcaactggtcaagaaatactgcaattttttacgttttatggatatgcgggtattataggtggaataatctctatggtactattttcatggtttggagcagaagttatagataagggaagagaattgaaacttaaggagccaataaaaatttatcaagtatattgtggaaaatatcttggaacattttttgaatggtttggtccattgtttttatttggaacattagtaataatgattgcaggagcaggagctacactatcagagtactatggattaaatccatatgtaggtaggattggtatggcaatcgtttccctaataactgtttcattaggtttgacaaggctttctaaaatactaggtaatataggacctataataataatatttacacttttagtaggagcaattagtttatttagcaatattgatgctttatcaaatgctggaaatatggttgatagtttaaatattaaaactgctacatcaaatggatatttctcgggagtactttatacttgttacaatgtaataatagtaataacattcttgacaggaatgggagcttctgcagtaaataagaaagatgctgtatggggtggtatagtaggtggagtagcacttatggcagcagctataatgatgaatttggcattactttcaaacataggaaatatatacacaaaagagataccagcactttacttagctgataagatatctccaataataggtattttattctcagtagtacttttactaggaatatacactacagctgtaccattgttatggtcagtaactaaccgatttgtagaagatgaccaccctaaatttaaaattataacaatagtggtaagtatattagcttgtataggaggtttactgccatttgataagttagtaggtacactatatccatatacaggttacatgggaattttaattttactatgtatgctttatagaagaattactaaaactgaggggtacaaggagaataaatctgaaataagttagtactgtaatatacttatggaatttaatttatactctaaatatagagtaattaaaataaaatagctatttaaatatggtacctgtatttcatggtaccatattttatggatgcagattttttttgtttctgataaaatgtataatagttggaaattacgttaagtataaaaatataaaacttttctacgattatcatagttttaatatataaaattatactaacatttaaatggagcgattattagtatttttaggagataaaaatggaaaaattagaaggaatgataagtgaaatagtctttaaaaacgaagataatggttatacaatagctcacctggtaaatgaaaatgatgaaattgtggttgtaggatgtatgcctactttggcaattggagaaagcatagaagttgaaggaaagtgggtaaatcataagatttatgggactcaatttgaagtgaatagttttatgccagtaacgccatcatccttagaaggaatttatgtttacttatcttctggaatgatacatggtattggtgaaaaaatggcaaaaagaataattgataagtttggtgtagatacgttagaggtgatacaaaattcaccagaaaaattacaagaagtagaaggtatagggagtaaaaaagtaaaacaaatagtaaaaagttatgaagaagacagagaattgagaaatataataatacagctatctccttttggaataacaccaaattactgcctaaaaatatataaaaaatataaaagcagtgcaatagaagttataaataaaaacccataccaacttgctgaagatataagaggaattggatttaaagtagctgatagtatagcaagtaaaattggtatagataaaaactctaaagatagaatttgtcagggaatcttatacactttaaataaatctttaagtaatgggcatacatatttaccagagcatgttctaatacaagattcggaaaaattattggagctaaatggagaaataataaaagagtgtgtaatgatgctagtttataatcaaaaaatacatatagagaaagtaaacaatgaaaatcttatataccttatgccatactatttagctgaaaatggagtatgtagtcaaatagtaaaattatcacagtatgaatttgaagacttaaaaatagatatagataacgagattaatgttttagaagaagataagaaaattaagttagcagaaaaacaaattttagcagtcaaagaatctgttaatagtggagtattaattataactggtggaccaggaactggtaaaacaactaccattaatgctatcatagatatatttgaaaataatggtaaaagtgtgactttggcagctccaacgggaagagcagcaaagagaatgagtgaaacttctaataaagaagcaaaaactatacataggttgctagaaatgggattttcaacagatgatgatttaactttttttaaggatgaagaagacccaataaattcagatgtaataattgttgatgaggtatcaatggtagacattatcttaatgtacaatttacttagagctataaagttaggaacaagagtaattttagttggagatagtgaccaattaccttctgtaggtgctggaaatgtacttaaggatatgattaattctaatattataaatgtagttaaattaaatgaaatatttagacaagcgcaagaaagtatgataattgtaaatgcccataagataaacaatggagaaccactttatctaaatacaaaaggtaaagatttcttttttataagaaaatcaactaatgaagaaattttaaatgaaataataggattggttaatgaaagattacctaaattttataaagttgataaattaaaagatatacaagttttatcttcaatgagaaaaggtgaattgggagttactaatctcaatatagagttacagaagtatcttaacaaaaaagaaaaatttaaagttgaagaaagtttttctaaaagattatttagagttggcgataaggtaatgcaagtaaaaaataattatacaaaaaaatgggaaacagaagaccaaaaagaaagtggagaaggtatctataatggagatataggatatgtttatcacatagataaagataagaaaactatttatatattatttgaccagactaaaattgtatcatacctatatgatgaattagatgaaattgaccatagtttttgtacaacaatacataaaagccagggaagtgaatttccagttgtagtattgccaatagcgtgggctcctcctatgttacttagccgtaatttattatatacagcagtaacaagagcaaaaaaattagttgtattagttggagatgtgaaatatcttgaatatatgataaaaaataatagagttaatcaaaggtattcaaatttaggatataagctaaataaatttaaacaagaagggttgttgatagaataaatatgaaaatatgcaatgataattttattaagaattttaaaaatatgattaataaatgtttggattttatatatcctgagaatataagttgcataatttgtgataaatccataaagaaaacaaatacttattcaatatgtaaaagttgttttaaagaaatgaattttatacaagatggttgcatgaagtgtggaaaaccaataatacgtcattcaattgaaaaagaatttattgaagagtgtagttattgttttaataaagacttttattttgataaatcaatatcttgtattgaatataatgatgtgacaaaaaagatggtgttagggctgaagtataaccaaaaaacctttatggctaagtatatagctcaaataatgaaagaaaaattatatttagaaaacataaaatttgattatatattatttgttccacttcataaaaaaaggctaaataaaagaggttttaatcaggcacaaaaaatagcatttaatttaagtaaaatagtaaatattccattattagattgcataagtagaaaaaaatatacaagaatgctatataaattgaataagaaagaacgaaaagaagaattaaaaaatgtatttgttgttaaagaaaatgttaaattaataaataataaaaatatacttttaatagatgacatatttactactggtctaacaacaaacgaaatctctaaacttttaaagttatcaggtgctaataaggtttttgtattgactctacttacaaaagcaaatgataattatattatggaataatcttatatattgacaattttagtttaaaatattaaaatgaataagtgatatttaggtctgtggttgaaagtccaagccagtcgcaggcaaagggatccacgtaagttaacactaaaaattgggttaatgatcatggtgcggcttagaagtaagacctaccgataataaaatcgagagagagtagtagtgcggcgaacccaagcgaaccctccagtaggcgagtgtggggtcaaaaaccaggtcagctaaatatcatattaaaagagagctagcatacctttatgtatagctcttttttatatataataaatttaggttgagtcataaagaggtgatatgtttgaataaaagacaagaaaatttattaacaacattgctattaaaagaagagtttataaatgttaataagattgccaatgattttgagtgttcagaaaggacaataaggaatgattgcaaatatattgatgaatggttatctactttttgtaatgcttatatcaaaagaaaacctaatattggaattaaatttagtggagatggaacagacaaaatactggtaaatcagaagttgcgaggtgaagttaaaagagtaaatagtgagcttcataagcaagttgagatattaaatttactactttgtaataataaaaaagttactttaaatgatttatctaataagttgtacataaataaaaatattgtcagagaagaaataagtaaattatcagtagcattaaataattataatttaaatgtctcgactaaaaaaggcagtggtatatatattgaaggggatgagaaagacataagaataatgttagtatcattcttatttaaatacatagataaatacagattaaacatagatgaaatagagtacttccatatagtagatataataattgtaaaaaacataatgcttactatagaggaggatatggatataagacttacagatatatcattcaagcaattgatgctatttttgcttataaatataatacgaataaggctgggaaattctttaaaagtatcaaatactaagaaagagcttaagctaaaaatgcttatattggatatagaagatgaattgaaatctaatttatccatagtattaaattatgaagaaaaattgtttatagaatctttaatattgggtatgaacaaacaaataaatagtaataatattaagaaatctttatatctaaatgaagaattagcaagttatacaaaaaaaattataaatttagtatcagaagaatcaggaataaattttaataatgatatattactttatgaacaattaatatgtcatttgaatgttacaatgcatcaaatgaaaagcaatgtttacttagaaaatccacttttagataacataaaaactaaattttgttttttatttacagtaatatcaagttcaatagaaattgaattaaaaggaaaacaaataacggaagatgaaattggttatcttacacttcactttcaaacctctctagaaagaaaatacagcaaaagggaatcaaataaaaaggcaagtattgtatgtccatttagttttggagtaagtatgctattaaaagtaaagatagaaaagagatttgataacataaaaattattgaaacattaagagaggaagatttaaaaagagataactttaataagactatagattttataattgcatttcaagagtatgaaaatatccaaaaaccaatttttataacaacaccattatttactgatgaggatgagaataaacttaaagagtttacaaacaaaataaaagaaaaagacacctcatataaacttatgaacagattaatgatgtctgattatttaataagagagttagaacatgatgatatttatgaagctataacatatttaactaatttattaattgaaaaacattatgcagaaaaagagtatttacaatctattataacaagagaaaagtcatatccaaccaatgttggaaaaggaatattattccctcatggagacatgaaatatataaaacaatctgttttatgttttgcaaggttaaaaacaccaataaaaattagaaatggaaaggatataaagattatacttttattagcatataaaaaagatgatgatagaaaagtatttagagaattatttaaagaaatatctaatttaacagaggatgaaaatatgctagatattctaagtaaatgtgacattgaaaaggtaaaagatattcttatataaaattcataatgaactatggataagcacaaaattttccatgtgatggaaaaagttgtgcatgtttttttgtttttataagatattatatgtttgtaaggtataaataatctaaaagtagagaagcaatttaggaggaaaaaatggaagaaatagttttaaagattataattcatgctggaaatgcaaaatctatgctttatgaagcacttgactatgcaaaggaaaacgattttaaaaaagcagatgaattaattgaaaatgcaaatgaagaaattttaaaagcacataaagtacaaactgaacttatacaaaaggaagctgggggagataaatcagatatatctattttattgattcactctcaagaccatttaatgacttgtatgagtgagagaaaccttataaaagaaatgattatgttaagaaaagaaattcaaaaattaaaataaaaaaattaagggggatttaaaagaatgaaaagaaaagtatatttattttgtagctttggtatgtcaacaagtttacttgcagataaaatgcagaaggtagcagatgaacacaatttaccaatagaagtagaggcatttccgatagcagaaattgacaaaatagttgaagaaaaaaatccagattgtatattattaggaccacaagttaaatacatgctaaaggagttaaaaccaaagtttgaagctcaaggaaaacttatagatataatcaatgaagttgattatggaactatgaatggggaaaaagtattaaaacttgctataaagctaataaaatctaaacaagcgtagaattatagtaaaaaataataggaaatgagggtggatagatgaatagattggaaagaatacttatgccattggctgaaaaaataggtaaaaataaattattaattgcaattagagatggttttttaatatcatcaccattattaataataggttcattatttttattagtagcaaattttcctataaaaggatggaatgaatttgtaggtcaaatttttggtccagattgggctgtaaaattgcaacaaccaactgtagcaacatttgaagtaatgactttacttgcagttttaggaattggatattcttatgcaaagcaaatagatgtagatccaatagcatcagctgcagttgcaatagttgccttttttatagtaacaccgtttgtaataccatatacaccagaaggaacagaatcagtctacatggtaacaggtataccactaggttggatgggctctaagggaatgtttgtaggtatgataacagcaataacctctgtaaaattatttgctgcagttgtaaaaaaaggatggacattgaaaatgccagatggagttcctccaaccgtatcaaaatcatttgcagcattaataccaagtgcaatagttatggtagttttctttttagttaagatagcttttgaagctacaccatatggaagtatacatgaatttatatttaagtttttacaaatgccattattaaaattaggaaatagtttaggtgctatggcaatcgcttatatattcttacatttattctggttctttggaataaatggaagtagtgttgttggggctgtgtataatccaatattaaaaattctatcagctgaaaacttagctgcttttcaggctggttcaaaaataccaaacataataacaggtcaattccaagatatgtttgcgacatttggtggagcaggtagtacactatcattagtcatagctatgttattaatatgtaaaagtaaacgtataaagtcaatgggaaaactatcaattttaccaggaatatttggtataaatgagccattgatatttggtctaccaataatgcttaacccaatactattgataccatttgcaatagttccaacaataaatataataatagcttacttctgtatgtcagcaggattagtgcctcttacaaatggagttcagttaccgtggacaactccaattatattctctggttttttaacaacaggatggcaaggtgcagtcttacaattagtgcttcttatactaggaatatttatgtatataccatttataaaaatgctagataagcaatacttgagagaagaaaatgaaactgttgaagaggaagatgatgatatatcttttgatgatttagtattataggaggaagattatgaagaaaatagttatgatattggatcaaatacaagctggagctggaggaaaagagaaaagtaatatacctcctgctggaaaatcaagcccattaggaccaggtgtaatgatggagcaatttttaaatgaatctaaggtaatagctaccttattttgtggggatgaattttttgtaaataatgaaaaagaagtaacgagtaagatgatagctatggtaaaaaaattaaaccctgatgtagtaatctgtggaccaagctttaattacgaaaacttttctaagatgtcagcaatactgtctaaaaatataaatgataaaacagatataccagcttttgcagctatgtcagaagaaaatatagatgtgataaacgaatataaaaatgacatatgtatagttaagactcccaaaaaaggtggaattggtcttaatgattcattaaataacatatgtaaattggcaaaagcaatagcgaataaagaagatataactttgatgaaagaagaattttgttattaataagagtattaattattagcaagtttaaatattatactatttataataagcatacattagtaaaatctatataatttaaggaggggaattttaacatgtggggaatgatagcgacatggagaatggccctagaaggaataactgaggcatcagaacatttagaaaaaggcatggaagcaggtgatgctgtagagcttgctgtaagaagagttgaagactatccattctataaatcggttggatatggtggacttccaaatgaaaattgtgaggtagaacttgacgctgcatttatggatggtaacacattagatattggcgcagttgctggtataagagattattctaatcctgtcagcatagctaggaagttaagttatgagaaggtaaataattttttagttggaataggtgctgaagattatgctcataaaaatggatttgaaagaaaaaatatgttgactgatagagcgaagttacattataaaaagagaaaaaaagagactttagacaaaggattaagcccatatgctggtcatgatactgttggtatgatatctttagacaaaactggaaaaatgtgtgcagctacatcaacaagtggattgtttatgaagaaaagaggtagaataggagattctgcactatctggttcaggattctatgttgatagtagtataggaggagctacagctactggtttgggagaagatttaatgaagggatgtatatcttatgagatagttaggcttatgaaagaaggaaagcatccacaagaagcatgtgatattgcagtaaatgaacttgataaacagcttatcaaaagaagaggaaaagctggtgatttatcattagttgccatgaataataaaggtgaatggggagtagctacaaatatagttgatttcactttttcagtagtaactaaagaagaatctcctgctgtatatatttcaaatagagtagatggaaagactatacataaggttatatcaaatgagtggatggaagcatatgaggctagaataaaagcaccgatagaagtaagtgagtaaagtagtgttacataattaaaatagagttttataataaggagatttttatgaatatcataagtaataaaatagatgagttaaaagaagatttattaagtgatattatagatattgtaaaaatacctagtgtcaaaggggagtcagaaaatggcttcccttttggcgaaaaagtaggggaggcacttaataaagcattagaaatatcaaaaaaattgggatttaaggttagaaacttggataattatattggttatgcagagcatggagatagtgatgattatgtttgtgtaattggacatgtagatgttgtacatgaaggagatggttggaagcatcagccttataagggagaagaaactaatggaagaatttatggacgaggagtactagacaataaaggacctataatgtctgccttatatggattatatgctattaaagaattaaacttaaaattagataagagagttagaataatatttggtacaaatgaagaaagtggatttgaagatataccatattatttagaaaaagaaaaaacacctattatgggatttacaccagattgtaaatatcctgttgtatatggtgaaaaaggcatggcaaagattagaataaaaagtaaaatcaattatgaagaagatgtatacctaggttttatagaaaatatgtctgaaaatgtgcttgttacatataaagagctgaatatagaaaatagtaatactatattagatataaaggtaaaatacgattttagttataaattgaaagatgtattagatgaaataaaagctagttttccaaatagtatcgatatagaggtaatttctaattttaatcctgtatattttgataaagagagtaatcttgttaaaaagcttcagctagcttatgaaagggttacatcattagatggaactcccgtgacaactaatggaggtacgtatgcaaaagtaatgccaaatatagttccgtttggaccttcatttccaggacaaaaaggaatagctcataatcctgatgaatacatggatatagaagatataatattaaatgcaaagatatttgcaaatgcaatatatgaattagcaaaggagtagttatgttagaaataataggaatgtcagtagaagacgctaaaattatagaagattgtggtgcagatagaatagagttagttagtgctttaactgaaggtggattgacaccaagttttggtcttatagaaagtgttgttaacagtgtaaagatacctgtgaacgtaatgataagacatcatgcgaaaagttttgtatacagtaaagaagatataagtataatgcaaaaagatataggtgtggttaaagagattggtgctaatggagttgtatttggtgtattggataaaaacaataatatagatgagaaaaatctaaatgttttattgaaatgttgtgataatcttgatgttacatttcatagagccatagatgaatcaaatacaatagatagtgttaaaattttgaaggattatgataaaattacgaatatattaacatcaggagggaaaggaagtatagttgataacatacaaatgataaagaatatgatgcttagttctaatcacataaaaattcttttaggaggaggtcttaattttaataatatagaaaagataaaggaattaactaaagcaagtaattttcattttggtacagcgattagaataaataacagtccttttgaagatatagatagacaaaagcttaaacaactcgtaaatataatttcaagatagtatatgaatataaaatacttagtttaaataaagagagtaagttaattataatttgggtatatgaatgttaataggtattaaatatgaaattattgttgagtatgctttataacttttaagtagttttaaatataaataatgaaagaaaagatagattatggaggttttagagggtttatagttattaaaaaattataaaggtatattggcatataatacacataatttcctaaaattaccatcttatgacatgaattcacatattaataaacaattaatggagatttttgtggatagaaataggagtaaaaatagctttaaataaacaaaaacaagagttattaacagttttatccacattatccacaggtgtttgtaataatattaatccacataagtatcaatgtaactaaaaatgataaataattctatcaattgaatagaaaaaatcataaaagtaaataataaaaagaggattatgagagttcgtgtagaatatattattaaagtataaattttcttatactgacataattgaagggagatgtatttatgaacataattatatctggaaaacaaatcgaattaactgatgcaataaaaaataaaatcgaaactaaactaagtaagttagataattacattcatccagacactgatgtaaaagttacagtaagtgcgagaaaagcaagacaaaaaatagaagtaacaatagctactgtaaatggtcctataattagagcagaagatatgcaggaaaatttatacacagctatagatgttgtatatgataaattaagtaaacaattaaaaaaatataaaaagagattacaagataaacataaagacaacaagagtataagattccaagattcagagataaatctagctgatgaacaagaggattatggggatgaaaatcaagaattagtaattcaaagacgtaagaaatttagtgttaagccaatgagtgaagaagaagctgtattacagatggaattaataggacatgatttttatatgttcaagaacatagattcagatgaaatagcagtagtttataagcgtaataatggtggatatggtataatagaacatgaataaagcaatttagatttaatcatattagctatcgataaataaattatcgatagctttttaaattaatattaaaagtatagtttttatggtaaaatgaataatagtacaataaagaacgaggagagatgtaaaatatgagctttatggataatttattcaacatggcagataaaaaagaattaaaaaagttcaataaaactgttgatataatagattcattagaacctaaatttgaatctatggcagactcggaacttaaaaatatgacaaatatatttaaagaaagattagcaaatggtgaaagtatagatgatatacttccagaagcttttgcagtagttagagaagtttctaagagagtgttaggacttagacactacagagttcaaatgattggaggtatagtactacatcaaggaagaatagcagaaatgaaaacaggtgaaggtaaaactttggttgcaactgctcctgtttatttgaatgcgcttactggaaaaggtgtacatgttgtaacagtaaatgattaccttgcaaaacgtgatagagaccaaatggcaaaaatctatgagtttttaggaatgagtgtaggcgttattatacacggtcaaaatccaaaagttagaaaagaacaatatgattgtgatataacttatggtacaaataatgaatatggatttgactatctaaaggacaatatggtaatacacaaagagcaaagagttcaaagaggattaaattatgctatagtggatgaggttgactctatactaatagatgaggctagaacaccacttatcatatctggacctggagacaaatcaactcacttatattcagatgcaaacacatttgttttaaccttaaaaccagatgattatgaattagaagaaaaagataaggctgtatctctaacagcatcgggtatacaaaaagcagaagtgtattttaatgttgataatataacagatatatctcatacagaattataccatcatataaatcaagctttaagagcacatgtaataatgaagaaagatgttgattatgttgctaaagatggagaaatagtaatagtagatgagtttacaggtagacttatgtttggtagaagatattcagaaggtttacatcaagcaatagaggctaaagaaggtcttaaaatacaaagagaatctaaaacactagctactgtaacattccaaaactactttagaatgtataaaaaactttctggtatgactggtacagcaaaaacagaagaagaagagtttaaagcaatttataaaatggacgttttccaagtacctaccaataagcttatggtaagagaagatttaccagattctgtatacaaaagtgaaataggtaaatttaatgctgtagcacaagaaataattgaaagacataaagttaatcagccaatacttgtaggtacagtatcgatagaaaaatcagaattattatcacaaatattaaagaaaaaaggcattaaacatgaagtattaaatgctaagcatcatgataaagaggcagagataatagcacaggctggtagattaggcgctgttacaatagctacaaatatggctggccgtggtacagatatagttttaggtggaaacccagatttcttaactaagagagaaatgagaagaaatggatttaaagaggaaatagtaaatagggtagatactccaatagaaggtatacctgtaaaaggtaatgaaattctatttgaagctagagaagagtatgaaaaactatttgaaaagtttaagcaacaaacacaagaagaacaaaaacaagttgtagaagcaggtggacttgctataataggtacagaaagacacgaatctcgaagaatagataaccagttgagaggtcgtgctggtcgtcaaggtgacccagggagttcaagattctatataggtcttgatgatgaccttatgagattgtttggtagtgatagaatatctggtattgtagataaaataggtcttgaagaagacatgccgatagaacatagaatattatctaagtctattgaaggagcacaaaagaaagtcgaaggtaaaaactttggaataagaaagcatgtacttcaatatgatgatgttatgaataaacaaagagaaataatatatgcagagagaaaacgtgtattagaaggtgaagatttacaagaacaaatacaatcaatgactcattctataatagaagaagcagttactctttatacacaagataaaggatttgatgaagaaggattcaaagaacatatgtataatctgttcttgccaaaaggtagcatagaaataccagaaatagaaaaacttaatccagttgaaataacagaaaaagtttatgaaatagctatgaagatatatacttcaaaagaagaacaagttggctatgagagaatgagagaagttgagagagtaatcttacttcaagctgttgataaccattggatagaccatatagatgctatggaccaattacgccaaggtattggtcttcgtgctgtaggtcagcaagacccagttattgcttataaaatggaaggttttgatatgtttgatgaaatgaataaacatatcaaagaagacactgtaagatatttatttaatataacaatagaaactccagtggaaagaaaagcagttgtagatgttgaaaatctatcttctccatcagatggaacacttccaacaagtaaaactgttaaaaaagatgaaaaggttggaagaaatgacttatgcccttgtggaagtggtaaaaaatataaaaactgttgtggaagataatctcggaggattaaatgttaaagttacaagagtatagacatagtatggagcagatggcttcaaatttagaagaattgagggtttctctttgacatagcttcattgatgaaaaatatacaaattaatgaagaaaagatgaatcaacaagacttttggaatgataatgaagtcgctcaaagagtacttcaagaaaataaatctttaaaagagacattagaagaatatgaaagcttaaaaagcttattagaagatatagaagtattaattgaaataggtttagaagaagatgatgattctgtagaaagagatatagaaaagtccatagaatcaatggaagaaaaattatctgaaatgaaaataaagactcttctaaatggagagtatgataaaaataatgctatattatctataaatgctggtactggtggcttagatgctcaagattgggctcaaatgcttttgagaatgtatataagatggtcagaaagtaagggttataaagttaagcttttagatataatatcagaccctgaagcagggataaagacagctacaattcttgtagaaggaacaaatgcttatgggtatttaaagagtgaaaaaggagttcatagattagtgagaatatctccatttgacccatcagggaaaagacatacttcatttgcatctatagatgtaacaccagagttagatgaaaatatagaagtagaaattaatccgtcagatttaaagatagacacatatagagcttctggagctggagggcaacatgtaaatactactgattcagcagttagaataacacatatccctactggtgtagtagttcagtgccaaaatgaaaggtctcagcatctaaataaggacagagctatgagacttttaatggcgaaattgatagaattaaaagagttagagcaaaaggaaaaaatagaagatatacaaggcaaatactcacaaataacttggggtagtcaaattaggtcatatgtttttcaaccatataaattggttaaggaccatagaacaaatgctgagtttggaaatgtagatagtgtaatgaatggaaatatagacttgtttattaatgaatacttaaaaatgaataaaatagtttaataaatatgcactgtaattaagatatatgtataagaaggttagtgcttaatatgcacttacagcacttaggctgaggacgataaccctcagccttcgttctgttttgttatacttatgaaaaactaacattaggagtgaataaattggatataaatcaaatcttaaaaaaagagtttaatcttagagatgaacaaataaataatacattaaaacttattgatgaaggaaatacaataccatttatagctagatatagaaaagaaatgactggcgaaatgagtgatgttacactaagagaattttatgaaaaattaatgtatttgagaaatcttcaaagtagaaaagatgatgtagttagactaatagatgaacaagggaaattaacagatgaaataacacaaaatatagaaaaagcaaaaacattacaagaagtagaagatatatatgctccatataaacaaaagaaaagaactagagcaacaatagcaaaagaaaaaggattagaaaatttagcattgtcaatactagagaataatttagataatatagaaatagaggcaaagaattatcttgatgaagagaaagaagttctttctattgaagatgctctaaaaggtgctagagatataattgcagaactagtctcagatgatgctaagattagaaagtatataagagaattagctttaagagaaggtatgatagttagcaaaagtgctactgatgagaaatcggtttatgatatgtattatgattataacgaagcagtaaaaagtatggctccacatagagttttggcaataaacagaggagaaaaagaaagcttcctaaaggttaagttagaaataaataatgataaagttttaaattacataataaacgaatatgtaaatgataaaaatttcaaaaataaagaagaaatcgtaagttcaatagaagattcttataaaagattaattttcccatcaatagaaagagaaataagaaatcatttaacagaaatagctcaagaaagagctataagtgtatttggaaagaatgttaaaagtttattgcttcaaccaccagttaaagacaaagtagttatgggatttgaccctgcatttagaactggatgtaaaatagctgtagtagataaaaatggtaaactactagattatacaacagtatatccaacagaccctcaaaatgatgtagagggagcaaagaaagttttaaaaggattgattgaaaaatacgatatagatataatttcaattggaaatggtactgcatctagagaatcagaaacttttgtatcagaaatgataaaagaaatagatagcgaagtgcagtatgtgatagttagtgaagcaggagcatctgtttattcagcatctgaacttgcaaatgaggaacatccagatataaatgtatcaataagaggagctatatctatagctagaagattacaagacccattagcagagcttgtaaaaatagaccctaaaagtattggtgttggtcaatatcagcatgatttaaacaaaaagagattagaagaagtgctagatggagttgttgaagattctgtaaatagtgttggagtagatttaaataccgcatcatactccctactagaacatgttgcaggaataagtaaagctatagcaaaaaatataatagcatatagagaagaaaatggagattttacatcaagagcacaattgaaaaaagtaaaaagactaggacctcaagcatttactcaatgtgctggatttatgagaatcttagagggtaaaaatccactagataatacaggtgtgcatcctgaaagttatgatatatgtaaaaaaatgattgagataattggatattctttagatgatgtaaagaataagaatataggtgaaatagatgaaaaaataaaagaaattggcttgagggaattaagtgaaaaactggaagtaggacaagttacgttaaaagatatcatagctgaaatcaaaaaaccaggaagagacccaagagaagaaggtataaaacctatacttagaactgatgtcttaaaaattgaagatatacaagagggtatgactttaaaaggtacaataagaaatgttgtagactttggtgcatttgtagatattggaataaaaaatgacggattagttcataaatcagaaatgagtaatagttttgtgaaagaccctatgagtattgttacagtaggtgatatagtagatgtaaaagtcattggaattgacttaaacaaaaaaagagttgccttatcaatgaaaaaatagataagtttatgtatggttatagtacttaaattctatatttgtaaatgagattactcgagtgtataaatgttaaaaatttgtaaaagtatatagtaagaaaatatattaaaataagaacgatagtcttgaaaatcaggaggaaaatgaatgatttttataaaaaatggtaaaataaataccataacaaatgggataattcatggagatatacttatagatgaaggaaaaataatagaaattggagaagatttgatagctcctttagatgtagaggtaatagatgctagtaataaacttgtgtttcctggatttatagatgctcatactcacttaggtttatgggaagatggtatagggtttgaaggagcagatggaaatgaagagactgacccaataacaccacaattaaatcctatagatggaattaatccaatggatagaacttttaaagaagcttttgaaggtggaataacttctgtttgtacaacccctggaagtgcaaatgttatgggtggtcaatgtatagctataaagacatgtggaaaaagaattgataaaatggtaataaaaaatccagttgcatctaaaattgcttttggagaaaatccaaagagctgttatggtcaggatgataaatctcctcaaactagaatggctatagctgctttacttagagaaaacctaaaaaaagcagaagaatatttagaggatattgatatgtatgagagtcatgatgatgaagactgtgaaaaacctgaatatgatataaaaatggaaagtttaataccagttttaagaagagaaattccttttaaggcacatgctcatagagcagatgatatgtttacagcaataagaattgcaaaagaatttaatttaaagcttacattagaccattgtacagaaggtcatcttattgtagatgaattagtggaagaagggtttcctgtaatagtagggccatctttgtcagaaaggtctaaatttgagcttagaaatttgacatttaatacagcaggaatactttcaaatgcaggtcttgatgtatgtataatgacagaccatccagtaataccagttcaatatcttccaatatgtgcaggtattgcagtaaaacatggtatgaaagaagaaaaagcaatagaatcaattacgataaatccagctaagactttaggaatagaagatagagtaggctctatagaagttggtaaagatgcagacctagtaatttgggataattctccactagagattcaaagtaatgtactttacactataataaatggcaaagtagtgtatgagaaaaaataacttgacaattattaaaaaattaactaatataagagtgtaaggaaaattaaaaaatcaaagaagatcttcggggcagggtgaaattccctaccggcggtatagcccgcgaactacttaggtggttgatttggtgagattccaaagccgacagtaaagtctggatgagagaagatatttatggaagataaataagtttattttagtttgtttaaactatatccataaaaactcgaagatagggtcttcgagttttttgtttttcctaaaaaatataaacatattgattagggggaaaataattatgcaaaacacagcaaaaagaggcaatatgatttcaacaagaactttagtagtaatgtcaattttatctgcaatatcttatttattaatgtttattcaagcaccaataccaggtatatttccagatttcttaaaaattgacttatcagatattccagcaatattcggaggaatgtctctaggaccattagttggatttggaatagttgtagtaaaaaatgtgttacaagcaataacagcaacaacaactggaggaataggagaatttgcaaatatattaattggtggttcttatgtaatgatactttgttattcatataagagaagtggagatttaaaaggtgtactgattggttttgtattaggaacaatatctatgactataattggttcattagtaaattattttgtaatgttgccactttatggtcaacttatgggactagatgctataataggtttaggttcagctataaatcctcaagttcatgatttattcacttttgtaatttggatgatagctccatttaatgtgctgaaggctgttataatatctttagtaacattgccactttataaaaaaatgggaaatataataaagaaataattagacaagaaaatataaaattaaatgtattgaatagccataatttatttataacttcagtcctatattgtgattgatatattaaatatattatggctttattaatttatcaaaaaatgtatataaaataagaaatatttagacaaatttaaattttaaaataaaggaagaattaaaacgattaactattaaaatatgaaaaaggtatctacaatatacagagcgaatttataataaacaaaaaataaagttattattaaaaaactataaagactaataatcaaacttttaataataactaatttaataatgataggggtgtatattcatgcatttatctaaaaaaataaaaaaattatttttagatgataaagggtattattttaatagtaattgggaagatattcatattggtatttatgatacaaaattaggagattctttaaagtatatcactaatgaatatattgaaaatatggaaagggtaaaatacgattatcgtgaattaaaaaatatagaaaatcaaactgatggtatgtgtattttagcaataaggcagaattacaaggcattagagtatgtaaaaaatcaaaccgaagaattatgtttagaggcaataaagtataattataaagcacttgaatatgtaaaagaacaaacagaatacttgtgtcttgaagctataaaaaaagattgtaatgcacttaagtatgtacgaaataaaacagaagggcttattataaaagcaataagtcattcttccaatatagatgttgtaagtatactaaaggctttagagactcaaacaagaaggatatgtttagaagcaattaaaaaagatggcaggtgtcttgcatacgttagagaacagagtgaagaattatgtatagaggccattaagcaaaattataaagcattaaaatatgtaaaaaatcaaacggaaaaaatgtgtatagaatccgtaagacaaaatggtatggcattacaatatgtaaataaacaaactgataaaatatgtatagaagctgtcaaacaagatggaagaagtctacaatttgtcaacaataagacagaagaaatatgtataaatgctataagatatttaaataaaaaatataatattaaagatgtactaagttacatagataagtatacagaagatatatgtatagagattgtaagacaaaatggaaaaatgcttatgtatataaaaaatcaaacagaaaaaatgtgtattgaagcagtaaaagagaactataagtctcttaagtatgtaaaagagcaatctgagagaatatgtaaagaagcattgaagcaaaaccataaagcaaaagagtatgtaaaaattgctattgatgattgtatataaggtgtagatacagccatcaatagtgaaagataaaaaaagataaagacaagtactttataataatctaggcttatactataattaattaagcagtgatataaattcacatgacgattatatcaaaatggagatgaattgatggcaaaaatatatttagaaaatgaaaataaaactagagaaataggatataaattaggtaaacttttaaaagaaggcagtgttatctgtttagtaggagatttaggagctggtaaaactacaatgacacaaagcttggcagattcattagggatagaagattatataacaagtcctacttttactataataaatgaatatgaaggaaaaatacctttgtatcattttgatgtttatagaataggtagtagtgatgaaatgtatgatattggttatgatgaatatgtaaattcaaatggaatctgtataatagaatgggctaatctaatagaagatatacttccaaaagaatatttgaatatagaattgagatataaagatgaaggaagagaaatgatattaactccaaaaggagagttttataaagagatagttgaggagttgattaaataatgaaaatactaggtatggatacgtcttctatggcagcaagtgtagcagttgttgaagatgataacttaatatgtgagtttacagtaaacaacaaaaaaactcattcacaaaagcttatgccaatgatagaaaatatgttgagtatgagtgatttaagtataaaagatatggatttattagctgtatgtataggtccaggttcgtttacaggacttagaataggtatggctacagtaaaagctatggcccatgtaaataatataccaataatagcagtaaattctttggaatctctagcaaataacataaatttctgtgatagaaagatatgttgtatattagatgcgcagaaaaatcaagtttattcagctaaatacaagtttgaaaatggagagatgatagaattagatggtgttgatgttgtagagtttgatgctttagtagatgaaattgtatcaactaatgaagaatttataatagttggagaagctgtatacaaatataaagacaagttagagaatataaaaaatataaaaataccttcaccagctaataatgtatctaacgcaggaagcttatgctctttagcattaaataaatataataaaaatatagatgtacatacttgttatacgataaatcctatgtatatcagaaaatctcaagctgaagtacaatatgatgaaaaaatgaagaggctaaataatggaagataatacaaaactaatagtagatgatataaaaatagaagaaatgactacagaagatatagatgaagtttttgaagtagaaaaaaattgttttgaagattattggtcaaaagagtcttttagaaaagagttgtctaatgaagtagcaaggtatatagtagctaagttaaatggaaaaattgtcggatatgtgggaatttggcttatacttgatgaagggcatataaataatgtggctgttcatagtgactatagagggaaaaaaataggggacaagttgataaaatgcatagttgatttatgtaaagataataatattgcatctatgacattagaagttagagcatcaaataaaatagcacaaaatttatatagaaaatatggatttaaaatgggtggaataagaaaagaatactacagtgataataaagaagatgcaattataatgtggaaccaattaaaagaggtgtagagtttatgagtgatataataacattagctatagagagtagttgtgacgaaacagctgcatcagttttaaaaaatggtagagaagtactttcaaacataatctctactcaaatcgagacacataaaaaatttggtggtgtagttccagaagtggcctcaagaaaacatgtggaaaatattgatatagttgttcaagaagctttagacaaagcaaatataggttttaatgatatagaccatatcgcagttacatatggacctgggctagtaggtgctttattggttggtctatcttatgctaaagcacttgcatatactttgaatattccacttgtaggagtaaatcatatagaagggcatctaagtgcaaactatatagagcataaggatttaaaacctccttttataacattaatagtatctggaggtcatactcacttggttgaagtaaaagattatggcaagtatgaaattttaggaaaaacaagagatgatgcatctggagaagcatttgataagatttcaagagctatgaatttaggctatccaggaggtcctattattgataatctggccaagaatggaaataaacatgctatagaatttccaagagcctatttagaagaagatagctatgattttagttttagtggattaaaatcttctgtattaaattatctaaatggaaaaagaatgaaaaatgaagaaatagtagttgaagatgtagcagcatctttccaagaggctgtagtagaggttttatctaataaagcactaaaagcagtaaaagacaaaggatacaatatcataactctttctggtggggttgcttctaattcggggcttagagctaaaataacagagcttgctaaagacaatggtattactgttaagtatcctcctctaattttatgcacagataatgcagctatgatagggtgtgcaggatattataattttataaatgggaaaacgcatgatatgagtttaaatgcagttccaaatttaaagataaatcagtagagttagatgaatttgtaaatataaaagtattgtttcaaaaaagtaagtagaagtgaaattaaatataataaaaataaatatagtatatattaaaacttgaagtaaaactatttataatctttatattccaatgaattgcaacaaattttaggatatacagattgtctttggcttagatttgcttcaagtttaattttttctatagaaagattattttaaaaagtgggtaatatacccttttttttcattcttaaaaagttttatactaattatagaaagattaaggaggggaagaaatgagtcaaagtaaagaagacaaaataagaagtattttggaagcaaaaaatattaaatcaaattttcaaaataaagaaaatttaagtgaatttaatgaaaaaaaagcaagtaaaagagcagaagacttattagatgtatattataatacattatctactgctgatatggaatttccatattggtataatagagaatatagaaaatcagatggtgatataccagtagttagaagagctaaagctcttaaagctgctttttcacatatgacaccaaatataatacctggtgagaaaatagtaatgcaaaagacacgccattatagaggttcttttccaatgccatgggtaagtgaaagtttctttgttgctcaaggagaacaaatgagagaagaggcaaagaaattagccagtaacacagctgatgaacttacaaaatttgggtctggtggaggaaatgttactgaaagttttggaaatgtcgtttcaatagctggtaaattcggaatgagaaaagaagaagtacctgtacttgtaaaaatggcaaaggaatgggttggaaagtctgttgaagatttaggttttcactatgaaaaaatgatgccagattatgatttaaaagaaaacctaatgagtacacttatatgcatgtttgattcagggtatacacttcctcaaggtagagaagttataaattatttttatcctttaaattatggattagatggaattatagaaatggcaaaagaatgtaaaaaggcagttgcaggaaatgcatctggagatgggcttattggtatggaccgtctatatttttatgaggctgttattcaagttattgaaggattacaaacttggattttaaattatgcaaaacatgcaaaatatttagaaagtatagagacagatttagaagctaaaaaagaatactcagatttagtggagatattagaacatattgcacataaacaacctcgtacatttagggaagctcttcagttgacttatacaattcatatagcatcagtaaatgaggatgctatatctggtatgtctataggacgttttggtcaaattttatatccttggtatgaacaagatatagaaaaaggactaattacaaaagaagaggttatcgaattattagagctttatagaataaaaatcacttgtattgactgttttgcttcagcgggcgtaaatggaggagtactatcaggtaatacatttaatactttatctataggtggattaaaagaagatggttctacaggagctaatgaactagaagagttattattagaagcaagtatgagatgtagaactcctcaacctagtttaactatgctatatgatgaaaagcttccagaagatttcttaatgaaagctgctgaatgtacaaagcttggttctggttatccagcctgggtaaacaactcaaatggaacaacatttatgatgaaacaatttgctgatgaaggtatgactgttgaagaagcaagagcatttgcattaggtggatgtttggaaacgtctccagggtgttggaaacagttaactttaaacggaaaaacgtactctattgcaggtggagcaggtcaatctgctggctctggagttcactttatagctaatcccaaaattttagaacttgttcttatgaatggtaaagaccatcgtatgaatatacaagtatttgagcctcataataagccattagatacttatgaagaagtcatagaagtatttaaagattattataaacaagcaataaatgttttagaaagagcaaataacattgagttagatatatggagaaaatttgatacttctataataaattcactactaaagccagactgtttagacaaaggtcaacatataggaaatatgggatatcgttataatgcaacattaaacgtagaaacttgtggtactgttactatggtcaattcatttgcagcacttaagaaacttgtatatgatgacaaagcatttacaatagaggaaatgaaggatgcaatattaaataattttggatttaaagatgcattagaagtaggaaattattctatggcagaccaagtaaaagtagataagactggtaaatatgatgctatttacaaggcctgtcttgatgcacctaaatatggaaataatgatttgtatgcagataatattcttaaaaactatgaggtatggttatcaaaagtatgtgaagaagcacaatctttatatgctaagaagatgtacccttgccaaatatctgtttctacacatggaccacagggagctgctaccttggctactccagatggtagactaagtggaacaacatattcagatggttcagtctctgcatatgcaggaacagataaaaatggagtatatgcattatttgaatctgcaactatttgggaccaagcagtagttcaaaattctcagatgaatttaaaacttcatccaactactataaaaggacaacaaggaactaaaaaattattagatttaacaagaagttatttaagaaaaggtgggttccatattcaatataatgttgtagattcagaaacattaaaagatgcacaaaaaaatcctgacaattatcgtcaattaatggtacgtgttgctgggtttactcaatattggtgtgaattaggtaaaccaatacaagatgaagtaattgctagaacagagtatgaaggggtgtaaaatatgagaaagcatagtgattgtatgaatttttgtgcagtagatgcaaccaaaggaatttgtagattatcaaaacaaatgattaatttagatgattcagcatgtccagagataaaagtaatgccaaaatgtaaaaattgtaaaaattttgttgaagctaatgatgaaggtataggcaaatgtgttggcctagagaaagaagactgggtatattcaacattgaatgcaattacttgtgaaggacatgtgtttaatgagtagtcaaaagcaattagaaggcatgattttcgatgtacaaagcttttcagttcatgatggtccaggttgtagaacaactgtatttttaaatggatgtccactgagttgtaaatggtgtgcaaatccagaaagttggactgtaagaccacatatgatgtttagtgaattatcttgtcaatatgaaaatggatgtactgtatgtcatggtaagtgtaaaaatggtgcattgagctttaatcttgataataagccagttatagattggaacatctgtaaggactgtgaaagttttgaatgcgtcaactcatgttattataatgcgtttaaattatgtgcaaaaccttatactgtagatgaacttgtgcaggtaattaaacgtgattctaacaattggagaagtaatggaggagtaacatttagtggaggtgagccactacttcagcatgaatttttacatgaagtattattaaagtgtcatgaggtaaatatacacactgccattgaaacaagtgcatgtgtatcaaatgaagtttttaataaaatatttaaagatattgattttgcatttattgatataaagcatatggatagagaaaaacacaaagaacaaacaggtgtatataatgatttaatattagaaaatatatcaaaccttgcaaattctgactggaatggaaggttagtacttagagtaccagttatctctgggtttaatgatagtgctgaaaatataagtgatattatatcttttatgcacaaaaataatttaatagagattaacttattaccatttcataggctaggagaatcaaagtggattcaattaggtaaggagtatgagtattctgataagggagatattgatgaagagcatcttgaagaattacaagatatatttttggataatggtatagcttgctatgttggtcatgagacagctttttaaaatcaaatacaagtttttttaattaaaaaaggatgttacactaaaagctagagttacatccttttttatgtggtttttatgtagaaataattaagtaaagttttatatgttttatatattgttcatattgctttatgtccataaatattactttaaatttatactttatatattttttatagtttaaattacagttagagaatatattacgtttactttattgaagcagaagttttgtggtaaaatactactatgaagaaatttaatagaatatattttagaaacaactaaaaataatagttaggaggaagacatctatatgaacaaatcatggagtaacttgattattaagaataaagacaaaaaagtacgttcagggtggattattataactgttatggctgccttttacatatttgagtattatttaagcactatacttatggaaataataagaaaaattctgattgctacaggtgacattaatttaaaaacaaactatttttcggaatatgctaattggttaaatgacgttgggttacaggttgtatttcaaattctaacagattcacttatgattattattcctataattgtatggagatttattatgaaaaatcctattagtgaaatgggattacattcttatagaattaagaaaaaagaaggatatgtaggaatgttattaggaatatttaattgtacagtaatctttattataacaataacaattggtggtggtcatgttacttcatgggtaccaaaaatttcacctttaacagtttcttggatacttgtctttattttagttgcttttgcagaagaaattttaaatcgtggtttttttatggcagttttacgaagatgtaaaaatatttattttataatgattgttccatctgttatttttgggttgattcatatatggaatcctgatgttacttttttgtctgtaattaatattataattattgggattcttttttcatatatgtttataaagtcgtcgaatatatggatgtgtataggttatcattttacatggaatgtatttcaggggattatatatggtatgcctgtaagtggacttcaggttccagggattataactacacaaatcactcatggtaatctattaaatggagggatgtttggtattgaaggtggaattttgactacttttgttaatctacttagctttatatttgtatggtattactatagagattctaagtatgattttgttagtgataaagtaaatgtgactaatatcaagaattagttgattataataaattttaataatatcttctaaacttaaagtattctgtaggattgttggaaatttacaaaaatataaaaataacttggatattctatttactccaagttatttttatattcttttgtaaatagaaatggaacataaaaaattaaaacaaccatagatactattagtatatcatggtaagtgatagttgattctttagaatttgtgataagaaaagcactattatttaaaacatgaattatagcacaaaaccagatattcttagtttttatataaagatatcctaaaaatattgaaattccaactatatgtattgaacgtaatattactcctaatattggcgcttcaggtgtatataatgtaaatattagtggtaagtgccacaagctccaacacatacctaatattatgactcctaattttttaccaaatttatcaaaaaaaatattctgtaaaaaacctctccaggcatattcttcactaaaaaaaatataaatagtagttaatgatgttattggagtaaatataaattttatgataccactataattaggttgagccccttgtagtattagtataaatgatgttggaacaattacagaaatcataaagtaaataattaataaagaacctagtttaatattttttacaggatataaattttttttatttgatgaatatattataattgataagctacttataaaagttaatattaggtttataattataaattcattattatttattagatttaataacttaagaacaattaataatgaataaataagaaaaaataatatgattagtgaataaaattcatacatatcattatttaatccttcagtataaaactttgcaatagcaactgaagatagaggtaatatcatcatgaatgatgcaaagttttctggatcaataaatttattataatataacagtaaacctaatgaataagttaaaccaaagtttataaagaaaaagataataatttgtattttttttctttttatttcatttttaataaatactgggtttagaatatttatccatattaattttaagttcattaatttaatactcctttacaatatagattcttaactaaattaaaatattttattgaatattataaattcatgacagtcaatattattgaaaagtaacttataaaattatatataaataataaaattaattttactatatacccatatatttagttatattgcaggcagaatgtggtttaccataagcaaaaggacaataaaaaatatttttctatatttttattatctttttgtaaaagatttattatttattgcattaaattaataggcagtagaggcatagttgataaaattaatgaagaaattaaacttatgaatataaatttattattgagttttaatattacatttattattctctttgattttaatattgtatatttaataattattacattcgtctggttaataaataataattaaataaatcaaatgattttaatttactatatgattataatataacgttgattttttatgatttcaataatttcctatatacaaaataatacaaaaaatttattaaaaagttagtttattattttatttataaaaattaggatgaatttgtaatgttaatatcaaaaaaataaatataaatatcaaaaataaatttatttaaaattaaaattttatttattattaaagagtaaatataattattagtaatatatatagtatttgtaataaaatatcaataattagaaagattatgaaaactaaattagaagaactaaaaactatatttttattaattataatatttgaataatctttttaatcatataaaatgcatatacttgtaatatttaaaggtgatattaatattattagtgtatattaatattcccttgaaattaaaaaaacatagatatttcagtaatctaaaatagtctacaaaaataacagttttagcaaaattaataagaatacatatagatttaaacctaaaagtatgaacatgtctgttttttacaagattaaaatttatattatatgataaaattaacttaactatttcaataagacttataatttttttctttatactagaccttattgaaacctttatagtttaattctaattatatattataaataaagtatgtgtatattaaggaggtaatatgaagtttttaaatgttttaatagtagttgaagatattgagaaatcaaaaaagttttattatgatattttggggttaaaggtaatctgtgattttggagaaaatgttgtattagaaggtaatatatcattacaagaaaaaaagctttggttagaatttattaataagagtgacagtgaagttaagttcaatggaaatgatgctgagttatattttgaggaagataattttgatacttttgttgaaagattgagtacaatgaaaggtatagattatgttcatctagctatagagcataggtggggtcaaagagcaattagattttatgatttagatgggcatattattgagattggagaaactatgtcatctgtgtgtagacgttttttagatagtggtctttcaatagatgaggtagctaaaagaatggatgtaactgtcgaatatattgaatcagttttagaatagatggattatattaaagtaaaactatattttgtatagaagtaagggctgtaagtaaacttgtatggaaacaaatttacttacagtttttgtttttgtaagatacagaatataatatttgttataattttatttggatttttaaaaagtgcatgattttccttacatattataatagaatttaatatttattggatgatttaaatttagaaaaatataagtattagcttataaaagataattatacttactatcaagctgtagaatcatatatactattttatgtaattatgttaaaatttaattgaacaaattaaaaatatagtgaaaattgtagttttagtttatttatttaataaatatttcaaataaaataatgtttaaataagaaacataaataataatattattattgttcttaaagacaaaaaatcttagcttaaaaatttgtatcatataaaatccctacatattatggaagtaatgatacattatatgatatacacaataaagtataaaagtatttacatgttttttctatatattttataagttttaggtatggaaaattactaaataaaaattagattaatgattatgatagtatagataaagtttattctttttattaatagaaattgttgtataaaaataataaaagtgaggagagtgatatttaaataaaaaaattttaataagtattggtaatatagtttttagggatgattattttatgtaaaaagttgttatttgtaaagataaatatagaaaatattataagtattgatttagtgataatctaaaaggtgagaattgtaataaaaagagaacatatccttcaaatggatgtaaacttataaataacattattacaagagatttattatacatatactgcaactattaattagaatttatactgtatttgtatttaaataaaaacacaaataatattattgtaaaaatttataattattaaatatttaaagtataagatataataattataagtaatttatgtataaatgtataaaatatagatatatttagattaaataataattattattatacaaaaattttgtattaaaaaatatctttaaatttgaaatataataaatgttagatagaattttataaaatttaaaataaaaaattatataaggggtgtaatatgattaatattattatttgcgaaggtaaaaaatcagagagggtaattctaaatgattatataaatacctttttttataattacaattttgaatacaatatcaaagagtttgaaaatggaggcgatttattaaaaaagtatcctaataatgttgatatcatatttatggatatagacttaaatgatgaaaatggatttaatgtttcaaaagaaatcaaaaaatttgatgaaagtgtaagaattatatttgtatcctcatcaaataaatacataaagaaaggttatgagataggagtttatagatatttagagaagcccttaaaatactctctatttaaagaagcaatatcatcatatttaaaagaatgctacaaaaatgaagctattttatctataaaatgtaaatgcaagatatatttcataaaggtagatgatattttatatttagaagttttaaaaaatgatttaactatacatactgaaaaaggaatatatacttttaagaatagtatgaaagaaatagaatcaaatctagaagaacataatttttttagatgtcataaaagctaccttataaatttaatgaaggtaaatatgctagatatagaaaataatattgtatttataaatcaaaattcaataattgtaagtcgttataagataaaattattgagagaaaagttaaatagttgtttggtagatgtaataatttgaggtaaatttttgcccttatattctattctaatagaatatatctattgtaaaatatgaaaaaatttataataaaaactaattatagttaaaaatatacctttcatcaataacagattgaatatattaagattttattttacaattctattaacaattttattttaaagatttaatttaaaatttaaatatgtattatacataataaaataatgttatattatattaattaataaaatattttatttcaattttattaagtatggaggtgtattgtggaaaatggtaaatttcaattttttaaaggtgtaagaaattgttttaatatgatttatctacatgataaaagatatttatttatctctatgtttatggcaatttttcaggggattgttccatctatttctttgttagtaagtcaaaatatcattaataatatgcaaacattttcgaaaagtgtaaaagaaatattagttttgttaattatgtatttaatcataaatataattccttcaatttttcaaagtttttatggatattatagaataaagtttaataaaaattttgaaaaacatattgaaacaatgatgttagagaaatctttaactttgagtttaaaagattttgaggatgataatacttatgacatgataaatagagctcaatctcaaaaaggatttaatattactatactatctgaaaaccttatttcaataataagagaatcagtatctacactttctcttattgttgtattatcacaatttcaactttggctaataatagttgttattgttattcctgtattgaaatcattatattccattaaattaggaaaggaacaatatgatgttagtgtaaacagaacttggaaagaaagaaaggcctggtacatagattatttgttgtcaaaaggttatgcttacaaagagattatggtatttagaattggttctaaacttattaatcattataaaaaattaaaagaggatattatatctcaagatatgaatatagctaaaaagaattttattgctacgctattatgtacagttttagattcaattgtatctgcaggaattataggatttataataattcaaggtattttaaagaagattttaataggagatgcgactacatatatacaagcagttcaatctataaaggataatgttgaatcaatattttcgttatttagttcagtaatacaagatcttttttatacagatttactgtttaaatttctagattataactgtaaagaagactcaattgaacatataaaaatatttgaaaaaataggggatataaataaaatagagttaataaatatttcatataaatacaatcattcatcagagtattctttaaaaaatattaatttaactttaaataaaaatgatcctattgctatactaggaaaaaatggttcaggtaaaacgacacttttaaaaatattattaggtttttatgatgattatgaaggtgacatcttgataaatggaaaaaatttaaaggatattgaaaaagatgaatacattagaaaagtaagttgtatgtttcaagattatattaaatatgaggctacattaaaagaaaatgtcgccatgggagatgtatataagagtaacttggaagaaaaagttaaaagtaaacttaaagaaactaaattgaaaccaagtatttatgaggaagatggattagaaactattttaggaacctggtttggtaagaagcaactttctatgggtgaatggcaaaaagtagcaatatctagaactcttatgaaagatgctgatatgtacatttttgatgaaccagattcatctttagattctgaagcgggaaatgaactcctttctttatataaaaaaacatttgaaaataagattggaatatttataacgcaccatatccaacatgcaaaaaagataactaacaatattgtagttcttgaaaatggaaagttgttagaaagtggaagacatgatgaacttatggacaaaaagggtgtttattttaatttattttgtaactgcaaataaatattaaagggaggttaattaatgaatcaaaaaccatttatacacacatttaaagctggaaaatcatattttatttatgatgttaatacggataagattttaaaggtaaatgctgctgtttataattatctaaataaaattgagcataatttagaaaaagaaagtgactggaacatagaaatagaagacgaaattaataccttgattaattatggatttctaaaaaataaaagggtaaataaaacaatgcaccctgaaactaagtatataaaatatcatatagaaaataatctatcctctattattttacaagtaacccaaaattgtaatttacgttgtgactattgcatttattctggttcatacagcaacagagttcatacaaataaaagaatgaatatagatgtagcaaaaagaagtattgactatttgattaagaattctagtcaattaaatgaagttagtgttggcttttatggaggagaacccttacttgagtttgatttgattaagcagatagtagaatatgtaaaagtagttggagaaggaaaggaaatatactttaatctaactacaaatgcaactttatttaatgaggaaataatagaattctttgtaaaaaataatataacaactatgattagtttagatggaggaaaagaaattcatgataaaagtagaaaatttgcaaatacaggagaaggatctcatgatgttgtattaaaaaatgtacgttacataaaaaataaatatccagaatattataaaaagaatattacatttaatacagtgataaattcagaaaatgattacatttctatagatgattttatatctaaaaatgagactttaaaagattcaaactttttagcttccactcttaataataactattctgataaagaaatagtttcatcagatgaatatatattaggtaagagttatgatagattcttgactttactcaacaaattaaaatttataaaagatgagagtatgtcacctttatcaagaatagaaagagccttattagatgattttagatatgagaaaaatattgaaggtagattagagttaccagatgtgtggcatcatggtggaccatgtataccaggggcttttagaatatttgtaactacagatggagaattttttccatgtgagagagtaagtgaaagttctaaaatgggtatgattggaaatttagatagtggagtagatatagaaaaggctgaaaaacttttaaatataggaaaattatatgaagagcaatgttctgattgttgggcctatagttattgtgatatatgtatagctaagattgatgatactaaatgtaatgaaaatgaaataaaaccacatgattgtgacagaattagacattctacagaaaataatatgaaagattactgcgttttgaaatctctaggatatcaatattaaattttctaatgaaaggaaagatgggattatggaaaaagtacttatatatccatttaattataatttttttactattttaaatcattgcaataaaatttcagatatagaaattaattcactggttagtccttctggctgggggttatgcaataaggagtataatgttaataatattattactaaagttacaaatgattttcaaagtgaacttaaaaagaattctttggtatggtttgttgattcaaaagaaaatctagacttagaaaaatttataattcctaaattaaaagtagctctaaaagaaggtaaaaagatattatatacacgtgatgatcttaataaaatatctaggtatatatctcattatgaattcaaaaagattaatgaatggaatttagaaaaatatgaaataagagatatagagggtatatcacagataaacacaccaataatatttatttgtggtctttatggagggttagatacttttgatgtaaatataaggataggagaagaactaagaaaaagggggttttcaatattacaatttggtcctaaaaaagagagctatttatttaaaatgattcctataccagagtttatgtttgatgattcgataagtagtaagacaaagattattaattttaaccattttataaaagataaagaggtagaggcaaagccagatttaataattatagaagttccaggagaattattccctttctctagaaaaatggttggtaattttggaattagagcttttgaaatttctaatgcagtaataaatgattgtggtatattatgtattccatcaagtatatatgatagagaatattgtgaagaacttaaatattttattaaaggaagacatggtataaatatagattattttagtatagagaaaaaagttatagatacatatgagacagaggtgaagcaaaaattttcatatatgtcattagatgaaaacttttttgttgaagatatagaagattatgaaaaaacattttttatacatgataataaacaattactagaattagtggacaatatagtgaatcaattaaaagagtatgctaaagtaatatctatttagaattggaggttaattatgaattacactgaaaaggaattactactagagaatatattttttgatgtgactggaattaattttaataaaaataacaatttaaaaaaagaattatttttttcaccgtctttacatatacagccaagagaattacttttagtattttgcgaggtaatagaaaactttaatataaaaattccagaggaaaaacttttgaataggcaatttacgagttttgataatgttctaaaaataatcaatatggtataggttaataaaggtataaagtaagtgatcttatagaaaaggggaggatatgaatgagttttggaaaaagaatagaaatgaataatataggtgttgagacaagaggtgtttgtactattatgtgtccttatacttgtaagatgatggcatcttcatcttgtaactgcaagaataatgattataatgcaagaggaggatcatataatacatattataataaattgatacatggtcaaagaactcctgatggaatgtaaatatttcagtaataagtatactattaaattgatttagcatatttgattaaatttatctttcttactttatttccttttattataaaaatatgcagttgattataattaagagtgtgattttataataactgcataaatagtatctgttatataaatcacctcttcaattattatagtggtaaatatagtgattaggggtgatttttacaatttaaaagtataaattaattaaaagttattataataaattatacttatttaaatagtaagaattaaaagtaaagtttttaaatatatttgtaaaaatgtatatatattaataatattgattagaattaatatattatttcaatatttaaacattatttattggtactaatttccaaaatagttaattggatatacaatattattataaaaaataaatattatttattttagattttagaaattgaaatttccttaagtgaaggaggtaattagatgattagtatgattatgatgcttattggagtattatttatagtgtttgggataattttaactgctgtcgaaataaaaggaaaaatgccaggtttttatggagttgggcaaaatgcagtaagaaaaaatgctatagggattatagcagcaggtatagcattaattttttttagaaatgggttagatagtattgattcaattcttacctatggagtatttttagtgatagagttagtagtaataggattatattttcttataagaataaaatatgataaagatgggaatctttaaagtataaattaataatattttgattttgatatatgtttatataaaaaaattgtagataaattttataaaatagttttatctacaatttttttatatttattatattttatgagaagtaatagtataaaatattattgaattttttctctcgaaatatataatttagaatcttctgatttatttttatgctcgatttccttattttttttcataaatatatatagaggagctattaacaacattgcccctaatcctattaagactctattttgagttataggttttgaaatatcttctgcccaagcttgttgtaacaaccataagctacctaaaatagctaccattggtataacaggaccaaatggaatcttaaaagaggccttaacatctgttctttttcttaaaactattactgataaacaagttggtatgtactgagcaaatcttgcaattacactcattactgcaagttgttcaaaacttccagttagcacaagtggtatacaacaaattaaagatattattattgctacatatggagcaccatatttatttgtttttcctataaatgcaggaagagaaccttcttctgctagagaagaaccacatttaggagttactattgatgaacctatatttataccaaatatagatattaatgttgctacagatatgaaaactttaccataattgcctaaaaatacacttgaagcatctgcaattggaatactgttttcaaatagtctatctccaagtatacccatacagacaatttgaattaatatataaattattgcacatataaatattgtggttattaatgcgattggaagattttttttaggattttccatttctccacttgccacaataaatgattcaaagccggtaaatgcgtaaaatactaatataatggctggacccatactagagttaactacatttcctgaaggaacaatatttacaaattttataaagaatattccaactatcacaaaaactattaatggtactaatttagctatagttattacattattcattatctttgtgcttttaattccaaataagctatttattgaaagtagtgttacgagtattgcagctatacaacctttgtattcagtggcagattctggccaaaatgaacctaaagctgttgcaaatcctactgctagagtagaccatgatataattctaataaaccaagacattgtaccaacttcaaatcctataaaatctccaaaagcttttttggagtatagatatgctcctccattcttatcaaacatgcttccaacttctgcaaaacataaaagtattgatagaactaagagtgtagcaaaaatgtatataaacatactgttttgacctgctagactataaactttacctggtagtaagaatatacctgaacctattatgctattaatccctaataatatcatactaaatagacctaatttcttagctttttccatattaatttatctcctattcttttattaattactgtactaattaaaatacaaagtattcattacatgcatcataacacctattggtaaacaatcttcatctatattgaagctagaggtatgaagaggtgaaattaagcccttttcctcatttttacatcctaaatggaagaatgctcctttacaatgttctgtgtaaaaagaaaagtcttcaccacctaaagacgggtttggtctcaatataaatttttcctctccaagtaattctttagtacttgatataactgtatctactaattctttttcatttataacagcaggatagttttcatcacttacatgtaaagtcccaacacaaccaaatgcagatgcagtgtctccaacaattttagctattttatcaatcataaagtttcttgttttgctatttaaggttcttaaagtgccttctagttttacatcttcacatattacattgtgtgcatcaccaccatatattttacctatagtcaaaacggcagcattatttggttctaagtttctacttattatagtttgtaatgatgtaacaatttgtgaagctgtaactattgcatcaataccattttcaggatatgcaccatgagctcttttacctttgatacttatttttatagtgtctacactagcatttaatgtatcatattttgtttcgataaggcctgtttctatatgtggcataacatgaagtccgaatatataatcggccttggggttttctaaacacccatcctcaactaaaaattttgctcctccaaaaccttcttctgctggttgaaataagaattttacatttacattaagtttatcttttattgaatgtaaaactttacatgctccaagtagcatggttgtatgtgcatcgtgaccacaagcatgcatttttccagaatgtattgatttataaggtatgttgttttcttcttcaataggaagagcatccatatctgctcttatacaaatcgttttatctgcactttcttttaaaatatatgccataattccattgtgttttgtaaattccatataatcaattccgatttcttttaaataagaaattaccttctgtttagtaagattttcttcaagagctaattctggaattttatgtaattctcttcttatgtttataagccatggttttatagaattacaactttctattacaaaatcttttcctaattctttggtttgatattttaatttcaaagcctgttgcatttttattcctccaattgctttttattgttttattaatataataagcaattattatgccataattttcgatggagaattttgttttttataagaatattgaataaatataatcatttatctatatgtatagtataaaaaatgattgcatagtttcaattttcagtaaaaaatattattttgaagaaaatatattttatatgctagtttatataaaaaaaataggaaataaaaaaattatcctattcctattaattcctattatttatgtacaaaataaattataattttagggtacttgaaaaataaaaaaacctattgaaggagtactttaatcctgaatagatttctttgtttgataaattataattttatagacctttatattttaatttattgtaaaaatcttctcctttttgagttattttacttccatatcttcctgaactacaaattataagttcttctttttttagatattcaaatatttttttaatttttccttctgtaatttgaaggttcttatcgagtagtgcttttaaaattaatcccctaccaataccaacatctgattccttatttaaaattagtatctctaatatattcaatatatcattcttactatattttagttttaatgatgtatttttgttatctgaagaccttaagtttggaggtaaatctttctctaatacaatatcttcacacataatgtttaaataggatgtaacattttggagttctcttatattacctttccacatatagttttgtataagtttttttgcttctggtgtgattactaatttcttattaattaaatcttccataataattaatatgtcttcttttctttctcttagaggaggtatatttattggaattgtatttaatcgataatataaatcctctctaaattggctattatcaatcatttgttctaaattcttatttgtagcagatatgattctaacatctatattaattacattgtgagacccaacaggcattatctgcttctcttgaagaactctaagtagttttgtttgtaattctaaaggcatatcgcctatttcatctaagaatattgttccattattagcaagttcaaataatccttgttttccatcttttagacctccagtaaaagttcccttgtcatatccgaatagctggctttctaataaattttcaggaacggctgcacaatttactgctataaaaggttgattttttctatttgagttgttatgtatagactgagctatgagttctttaccagttccactttcacctctgataagtatgcttaagtcagatttagaaaccttcttagctaaatctatacattcaaacattttaggactatttgtttttatatccttaaatgtatattttgctatttgtcctttttctcttaattttttagtgagattttgttctaatttttttatgtatgttatttcttgtaaactataatatgtgcccattttttcatccctattgtatatgttttttttatttacatttatatatttcttattgaatacgacaactttatctagtatctctttctcactcaataaaacttttaaactatctacaaatatatcatcaatgtattttccatatatatcctcatttatgtctaaaatatcttttactttactattatatgtatttatttcaccatcttttgaagtaaataatataccatcttttgataaattcaatattgtatctaattcttctatttttaaaaataattccttatatttatcttttataccagtatctaaacttattatttcttctgagtatttaactagattagattgtatttcctttgaatcaatttgtaataaatttattatttctataaatgtagaaatatctatatatctgtgacctaaatcaaatatatctgagataaagctaggtactttttctggaactcctggagttatagctatttttatatttttatagttattatcattcatatatggaattggtctaatattagtcactccaattttataaaataaacttatagtttctagagtagtttcatcagaatcatttacgattagagcatttgtaccctgtggtaaagatagtagattataaattttatcttccctaaaagttcttcttaccacaatcacttttttcttatctagtatattatttataattttgtctaatctttctactgacattactaatatcacatcatcatttataatatcattatcatttatttcatttatgaagtatctattaatatttatagaatctccaaaaactaatttcaaattattttctaaaaagtctattaaatcttttctactatcatttaccagagctactgattttttcatttatttctccttatataataaatagtttccaacaaaatagttgtataaagcaatgtaattttgataatttaaatttatcaaataaaaaagaaagtgtctataatgactttataaaagttgcattaagacactttctttcttataattaaaaatcttgtcaccaaatccccctaattgttgcttaaaacttaaactgtatgtatatttttcatttctattcgattaaattataatatacacccaaaaaaatttattttaataaattctattgataatataattttgtaaatatagaattatattaaaataaattatatatgaaaatatatatgtataagtttattctgcgtgagtagaatgaatttgtcaagtttaatttagttgtaattgtatcttttattaaaaataatataaattaaaacatataaataaaatattttatacaatatattgtaaaggaggtaactttgatgaaagcagaaaaaacaagtatatatccaattattaaaaataatttaaacaaaatatcaattgttgaatataaaaagggtcaaagatttgtagcatcagataaagacttacaagaagtgttctttataatagagggagttgcattagtggagtgtactactagaggaggaaataaatttcttgttgacattgtacctgaaaatgaatttataggcaaaatcagttacatatatgaacataatttgaaatgtgatatatttgcaaagaccaatataaaattatttcgatttgaaaaaaatgtatttgaagagttttatctcaaaccagattttattgcactatttcacagaaaatgtacaagaagaatatatgaattatataaaaccagaatggtaagagaactattttcttgcacagaagttattgcctattgtatatcaaataaacaagaaaataatgtctgcaatataaaagctattcgtaatttcagtgaaatctattcaattagtagaaaaagtagataccattctctgctaaagttaactgaaaaggagatagtaaaaaaaatgggtaatacatatgaaattttaaactatgatgaattacataaattggcatttgaagtaaaagagtttttggaagatgagtaaaaattgttacttaatcaaaataaagtataataatttctgtaaaaaatagaaatagtctcactgaaaatcaaaaatactttagttattttcaatgagactgtttagaaatattgtatacttataatgtatagtataattattaatcaatttcctttactatattaatagcccattttttagataatgctctaggaacaccaaatataaacttaaccacttcttcactataagtgagtaaaacgagtacaaatataggtgcacctttaaatgcagctataaaagttagaggaatagaagctaaccacatacatcctaattctagaaatagagcatatttagtatctcctccacttcttaaaataccaattataaccaatgtattaaaagatttaagagccattagtattcccatgataaagaatatcttagttatatcagaagctaagctatcagaaacactaaacatttttaataataatggtatatttaaaattaaaataattccaagtattaaaccagctgaaaatacaagtatagaaaactttttagcatattcaatggctcttttaatatggtcagctccaagttcatttccaagcataatagatgcaccagatgcaatacatacagctgtcattatgaagaaattacctgtactggttgctatctggctagctgctatagcagaagtaccagctcttgcatatgcaacagaatacaggacagttccaattgcccatacagagtcatttacaaatataggaaagctttttgatgaaaaagattttataaaaattttatcaatagcttttagattttttagaccaaactttaatatatagtcttttttataaaggtaaacataagtaatcattaaaattaattcacatattctagcaataacagtagctagagcagcaccttttacacccaatgcgggaagaccgaagttaccaaatataaatccataatttaaaataacatttgttacaagtgcaaatgcactacaaatcatacctaacttaggatttctaacacctcttgaaccagtactaaatacagtacttacagcaattaatggataactaaatactgcaatactaaagtaatctatacaaagttttaccacctcagaatcatacgaaaatatgtgtataattggctttggtgttagtaaagcaggaataacaaatacaaaacttaaaacaattgccaatacacaagtaagacctgtgacttttcttatattactcacatccttctttccataaaactgtgaaataaaaactccagcacctcctgtgataccagataaggacatattaaaaagaaagaaaaattggtttgcaactccaactgaagctacagatgtctcccccaaactacttatcataattgtatctattacatttacagaagtagaaattaagttctgtatgataataggtatacataaagatagaagtattttataaaatcttttattttcgtcttttaaagaaaatagttcttgcaaataatcctctcctttttacataaattcttcccactcatcatatagagaggcaaggttattttctaaattaattttttcttggctaacttctttagctttatctggattagagtatacttcttcttgacataaaagtatatctaatttttcaatttcaatctctaacttttcaatttctttttctatattttgtctttttattctatttttcttttctatttctctttgttctctctcttttcttttttcatcttttatttgagttctagttttttcttctttttcttctataatactcatctcttggatttgcctttttttatctatataataatcataatttcccagatattcagtaattccattttcatctaaaactaaaattttatcaacaacagtatttagaaagtatctatcatgtgatattgtaaatatagtcccatcataattagttaatgcctcttcaaggacttccttagaatcaatatctaggtgattagtaggctcatctaataacaataagtttgcatttgatagtataagtttaagtatggcaactctagctctttctccaccactcaatgtagaaatcttcttaaaaacttcttcatctacaaataaaaatgcccctaacatatttctcaaagtagtttgagtaagatgagtattattttcccaaatctcatcaattattgtgttatctaaattaagagttttttgttcctgatggaagtaggaaacatgtacattagttccaaatttaatattgccactaagaggttgtagttcattagttattattttaaataatgtagatttgccaacaccatttgcacctataagtgcaactttttcccctctatatatatctaaatccaagtctttaaaaagtattctttctccataacccatagatacatctctaatttgaagaacatcattaccactctggacagaaggcgtaaattgtatacgagcttttttcctataagcttctggtttatctaaaacgtctaccttgtctaatgctttttctttacttcttgcacgctttaggtgtttttctctaccataagcttttagtctttcaattgattcttcttgcttttttatttctttttgttggtcttcaaatttcttaagctctagttctttttctattttagataactcaacaaatttagagtagttaccattatatactttaagttttttgttgtgaacttcaaaaattctatttacggattggtctaagaaatatctatcatgagatattaacatgacagttcctttatattgttttaaaaatacttctaaccattctattgcttcagagtctaagtggttagtaggttcatcaagtaacaatagagttggtttcttaagaagtaattttcctaaaagaactctagttttttcaccaccagaaagtatgcttattggcttatccatatcattgtcactaaatcctaatccttttagaactcctttggcttcagatttatatccatatccatttaaatctgaaaataattctagtttatgtgaatattcatccatgattttttctataattggagagtttgtttttgtactttcttcagatattttaacctccaattctcttaaataggattccatttctatcaaatttttaaaaacttctagcacttcttccaaaatagtattatccgaataaaaattggtattttgttctaaatatccgatttcacaatctttagaagtataaatatctccactatcatatccataaattcctgaaattattttaaataaagtagtttttccagtaccattaacaccgattataccaattttatcgccttcatttactgtaaaactaatattttctaatatagaatctataccaaaacttttatttaagttattacatgacaaaacaatcataaatttctacctccttgaactatctaaaattataatgttttgatataatataatcaaggttatatgtattagttttgaaaaagaaatattttattgtgaatcaaacaaaaaagaggacacttttaggaggtgaagatgttgggaaataaaaatatatcaatggcagttataagaaggctcccaaaatatcatagatatcttggagacttattagatagggatatacaaagaatatcttctaaagaattgagtgatataatagggtttaccgcttctcaaataagacaagatttaaacaactttggtggatttggacaacaaggatatggttataatgtagaagctcttcatactgagataggtaaaattcttgggttggatcgaccatacaacgcagttcttgtaggagcaggtaacttaggacaagctatagccaattatgcaggatttagaaaagctggattcgagataaaagctttatttgatgcaaatcctagaatgataggtttaaagataagagagtttgaagtattagattcagatactttagaagactttataaaaaacaataatatagatattgctgtattatgtatacctaaaaatggagcacaagaagttattaatagagttgtaaaagctggaatcaaaggtgtatggaattttgcacctttagatttagaagttccgaaaggtgttatagttgaaaatgtaaacttaacagaaagtttatttaccttatcgtatttaatgaaagaaggaaagtagacaacttaaacatattaataatgagcagttgtgaagagtattgagaaagtcagaagatttaatattaaatcctctggctttttgaaatattaggataaaaatttaaataatgtatggaaataaacaatattaaggagagtggtttttgtggaggaattatggaaaaaggcaattgaatttcatggtcatgaatgtccagggttagctataggatttaaagcagcacttgcagcaagaaaatatttaggatgtaaacagtcaggagatgaggaaattgtatgtatttctgaaaatgatgcttgtggaatagatggtatacaagtcgtgctaagttgcacaatgggtaaaggaaatttactacttaggatgactgggaaatcagtatatcatttctttaatagggaaaatggaaaatctataagaatatatgtaaagtcaaagccatttcaaatggatagagaaggatacaaaaagtacttattagaaagtgattttgaagaaatatttgagattacagatactaagttaagacttcctgaaaaagcaagaatatttaaatctcttaaatgtgaagtgtgtggtgaatttgcatctgagcaatatataaggattgaagaaggaaagaaagtatgtcttgattgctttaataaatatgaaagattttatgaggagtattaaaattataaattagattaaagttaaaagtattagatatgtactaacagtattttaagatgaattaggtagcaacataataaaatatataaataatattacttgaaccatacataattaaaaagaggctgattagtatttagaaaataaaatcagtctctttatgaataacgaattattattctggttgaggtgcatctacaggacaagctcctgcacaagaaccacagtctatacaagaaccagcatctataacatatgcgtcgtctccagctgatatacagctaacagggcattcagcctcacaagcaccacagcttatacaagcgtcagtaattttatatgccattttgaaatcctcccttttatatgtattgtaattcaataacattataacaaatattattgaatataacaattaaattaattctacaacaaaaactttattatgatattcttgttttaaagttttacaataaagtttaatctgcttatatttttatttattttaaagaagtttattttaaaaataaaattaaatttaaaaagttatgtattgattatatttaaaaatgttatactctaaaaaagtatattttattttaaaatttattaatacaaaggagatttactatgaaaaataaattagtttacatatgtattatgagtctattgctatttgtagtaggatgttctaataatccaaataaggaaagtaccattaaaaaagactctaagaataaccaaagccaagttaaagaagaaaaaagagaacctgtgaaaaaagatataactataagtttcgctggtgatgtaactatggggaactataaaggttcatcatattatggcagttttgaccatgaatttaaaagacaaggagaagattacaattattttcttaaaaatgtaaaacctgtatttgaaaaagatgacttaacagtggttaatttagaaggtccacttactacagcgtcaaatgcaaaagaaaaaaaatttgcatttaaaggaaagcctggatatgtaaatattttaaaatctggaagtatagaggcagtaagtattgcaaataatcattcagaagattattttgaagaaggaatgaaagatacacagtttatattggatgagaataaaataaattattttggattagggaaagatgctgttgtagatgtcaaaggaattaaagtgggtctattagggtataatggattatcaactgaatataatgaaaaaaatttaaaacaaatggaagatgatattaagtccttaaaaaagaaatcggatgttgttgtagtgtactttcattgggggatagaattagattattatccagataaaaaacaaaaagattttgctcattatgctatagacaagggagcagatttagttatggggtctcacccacatgttattcaaggaatagaaaagtataaaaataagtatatagcttatagtctagggaatttttgctttggaggaaataagaatccttctgatacagatagttatatatatcaacaaacctttactttttcagataataaattaacttcaattaaagagccaaatataataccaacctcaataacatctagtagctccagaaataattatcaaccaaaagtattggatggaagtgagaaggatagagttttaaataaacttgaaaaaataagcaaagatttaaataaataaaatgtaaaaaaaaataaatatatatatttattttaataatttatattttgtttagggtatggtaaatcgtggtattaaataagtagattttaatagttaaattatagtcaattataataaagctatttaatctacttttttaatataaaaatataagggggaatttgtaatggcttgtaacacttgtaaaatgtgcgaaagtgcagacaagaaattagaaagttttgtagcttcaaaggatgttgaaacagcatttcatagaacagaagatcagaaagttaagtgtggttttggacttcagggggtttgttgtagactctgttcaaatggaccatgtagagtaactcctaaatcaccaagaggtatatgtggagcagatgcagacactatagtagcaagaaactttttaagagcagtagcatcaggagcagcttgttatttacatgtggtagaaaatacagctaagaatttaaaaaatgttggaataactaaaggtgttgttaaaggagaaaaaacattaaatcaattagcagagatgtttggaatagaaagtgatgaaaagtatgataaatgtataaaggttgcagacaaagttatcaacgatttgtataaatcaagagatgataaaatggaattagtagaaaaaatagcttatgcacctagagtgaaaaagtggaaagagttaggtataatgcctggtggtgcaaagtcagaagtttttgatgcaatagtaaaatcatcaacaaatttaaatagtgatccagtagacatgctagttaattgtttgaacttaggtatatcaacaggattatatggtcttacactaactaatcttttaaatgatgttatgttgggagaaccagttataagaatggctcctgtaggatttaatgtaatagacccagactacataaatataatgataacaggccatcaacattcaacatttgcaaatttccaagatagattaaaagatgaagatgttataaaattagctcaatctgttggtgcaaaaggctttaagctagtaggatgtacatgtgttggtcaagatttacaattaagaggagaacattatcaagaagtatttgctggacatgcaggtaacaattttacaagtgaggctgttttatcaactggagcaatagatatagttctttcagaatttaactgtactataccagggcttgaaccaatagcagataaatataaagtaaaaatggtttgtttagatgatgttgctaaaaaagcgaatgcagaatacataggtttagacagaagtaaattagatgaacttagtaacactttaatagaaaaagcattggagtcttataaggagagaagaggaagtattgagatagatataccaaaagaccatggatttgaacaatctttaactggtgtaagtgaaaagaacctgaaagcgtttttgggagattcatggaaacctcttattaatttaattgcagaaggaaaaattaaaggtgttgcagctgttgtaggatgttcaaatatgacagcaggaggacatgatgtaaatactgttgaacttactaaagaattgattaaaaaagatataatagtactatctgcaggatgttctactggaggattagaaaatgttggtcttatgtcacctggagcagaagaattagcaggagaaaacttaaaagaagtatgtaagactttaggaataccaccagtattaaactttggaccatgtctagctataggaagactagaaatagtagcaacagaattagcagctgaacttggaattgacctaccacaattaccattagtgctttcagctccacaatggttggaagaacaagcattagctgatggagcgtttggtcttgcccttggcttacctcttcatttagctttacctccatttataacaggaggaaaattggtgacagaagtattaacagaaaaattaaaagacttaacaggaggacatgttatagtgaatccagaccctaaatcttcagctaatcaattagaagaaataataatagatagaagaaaaaatttagggttaaaggatgtggaatgcaatgcatagaatttttataaataaagatttatgtacaggatgtaagagctgtgtactagcatgtatgctaaaacacaataaagattatgacatgtacactcttgatttagaaaatatagataatgatagtagagggcatatagaattagatagtaaacataataatccagttccaattctttgtagacactgtgatgaacctgaatgtgtattagcatgtatgagtggtgcaatgcataaagatagtgaaagtggaatcgtttcatatgatgaagagaaatgtggttcatgttatatgtgtgtaatgtcttgtccatatggattattaaagccagatgatagaagcaagcaaaacatacttaaatgtgatttatgtaaagatgaggagtatcctagatgtgtagctaattgcccaagtggagcaattgaattacagaaggaggaaaatgatgaattatgtagtgttaggggctagtgcagctggtataaatgcagtaaaaacattaagagaattagataaagattcaaatatagtagtaatttctaaagatgaaaacgtatattcaagatgtatgttgcatcacgttatatctgaacacagaactttaaaacaaataaattttgttgatgaagattttatggagcaaaataatgtaaaatggattgcaggtaagactgttaaaggtatagacataaataaaaaggtagttcaaacagaagacattactgtaaattatgataaacttttaatagctacaggtgcatcttctgctattcctcctataaaaaatttaagagatggaaattttgtatattctgtgagaaacatagatgatatttataaaataaaagaaaaagcacaaaattctaaaaatgtagttataataggtgctggtttagttggtatagatgcattagtgggattatttaaatatgagcagttaaatatttctgtagcttttatggaaaagtacattttagatagacaattggatgaatatacagcatcagtgtatgaaaataagttcaaagaaaaaggtgtaaaattttacccaagtgcatcaatacaagaaattgtattggataacagtaaaaatgttacaggtgttgcattttcaaatggtgaagttttagatgcagacatggtaattgtagctacaggggttaaaccaaatgctgactttttagatgggacaggaatagaatatgatagaggtataataatagatgatatgtgccaaacaacacaaaaagacatatatgcagcaggagatgttgtaggtaaaaatgctatttggcctctggcagtaaagcaaggaattgtagctgcctataatatggttggaaaagataagaagatagaagatgaatttgcttttaaaaatagtatgaatttcatggatataccaactatttctataggaatgaatacacctgtagatgatagctataaagtattaaccagacatggaattaatgattataagaagtttgtttttaaagataatgtaatctacggagcagttatacaaggagatatttcatatgtaggtgtattaacttatttaataaaaaataaagttgaaatatatgatttagaaaataggatatttgatgtatgttatgcagacttttttaatataaaagaaaatggagaattttgttatagtgtatagtatatacgtggagtaaggtttataaatacagtaaatcaataaatagagttattctaaaataagaaaaatgacaaatcttatttagaaatagctctattttttgtaattaaatttaaattatattcaatttgtaaaatattattttgaacaattatacatatactctctagttagaggtaaatcattttttatacctttagtgaaaagtatttgatgtatatctataataccagtgttgaaagcagcagcacaagaacaaaggtataaatcccacattcttataaacttatcatcaaacatttctttaatctttggaagattctcagagaaacttttttgccagtatagtaaggtttttacataatgtaatcttaaactttctacgtctatagtatgatatttgtaatcactacaaatatgtatcatttctcttaggctaggaataactcctcctgggaaaatatatttttttatccaagggtctccataagattcctgcaatccacttatatagtgaagtaaaaacaatccaccatcttttaaaacagcatttacgtttttaatgaaaagttcatagttttctctaccaacatgttcaagcattccaacgcttacaactctatcaaacataaggtctgatttttttaattctctatagtccataagtcttacctcaagatagtcttgaaggttctcttctttaattcttgcgttaaattccttaaattgctcttcgctaagtgtaattccaacgccgtgaattttatatttttttgcagcttctattagtaaaaatccccaaccacaaccaatatcgagaaggctcataccttcctctaaatttagtttagttaatatgtggtgaactttattgacttgagcatcataaagagtatcattatcatttctaaagtatgcacaagaataactaagtgtcttatctaaccataagctataaaaatcgttgccaatgtcatagtgggcatgtatttctttcttctgatgtctcattgaatttgatgagtgcaatagatgttttacagctgaattatcaatattgaatttgtctatttgttttaaaagtagatttaaagttaagaataaatctccctcaacttcaatgtctctatttatgtaggcttctccaagtgctaaagatgtactttttaatagttcagacttgctaatatcattatttactataactttgaactgaggggagccctctccaattagaaattcttcctcatctttaagcctaactagaaatggtgtttcaccaaatttctctaaatagtcttttaaaaaattttttgtaatattcatattaccagctccttctaatgtaaatccagtaagtttccctgcttaaaatatattatagtcctttttttaaaaaagtaaaattttttcaataaattttttatttaaaggaaatttattttttataaagaaatttcatgttgtagtatattttttgcttataaattttggtactggatataatattaaactgttaatgatataataaatttaatctataaagtaaataaaattttgtaataaatagttaaagctattttataaggagatatatgatggaagtatatgctttggttgggtcaagtggcacagggaagagctttaaggctttagagttcgcatatgaaaatgatatagaatatataatcgatgatgggattttaatatacaaaaacaaggttttagctgggatatcggcaaaacaagcaaatactactatagaagcagttaaaagggctattttttataatctggagcatagacaagaagttagagaagcaattaaaaaagaaaatataagaaaaattcttattattgggacatcaaaaaaaatggttaatcaaattgtagagagattgtcaattggaagggtctgtaagtttataaatatacaagatataagtactaaatatgaaatagaaatagcaaaacaagctagaaaagaaggaaatcatgtaattcctgttccagccgttgagataaaaagtatggcaagtggtctcagtataaattctttgaagagactttttagaaaaggaaataataggaatatggtagttttagaaaaaacaattataagaccaacttttagttatataggaaagttttatattagtgctgatgtaattaaacagattattgaatatgaagtatacaactttggaagcattgatagaataaataaaatcaatatagagaattgcaataattttatgaatatttttgtaagtataaatatcaatgatttagaaactataaaaaaaattgaagacatacaacagacaataaaaaagtctattgagaaaatgactttagttaatgtacaaaaaatagatattaacattcataaaattaaaaaaataaacttcctccaatgttaaaaaataaactgagaaaatgatatactaatttgcaataaagtgtgctataattaaactgtaaatttaggaaatggttttttctaaatggagtatacataattataacgtatttataagggggctttcaaatgtcaggaaaagatgtaaatgtcttcgagatggcgcaatctcaagtaaaaaatgcatgtgataaattaggtatggaaccagcagtttatgaattattaaaagaacctatgagagttatagaggtttcaattccagtaaaaatggatgatggttctataaaaacttttaaaggatttagatcacaacataatgatgcagtagggccaacaaaaggtggaataagattccatcaaaatgtttcaagagacgaagtaaaagctttatctatatggatgactttcaagtgttctgtaacaggtataccatatggtggaggtaaaggtggaataatagtagatccatcaactttatctcaaggtgaattagaaagattaagtagaggatacatagatggaatatataaattaataggtgaaaaagttgacgttcctgcaccagacgtaaatactaatggtcaaataatgtcttggatggttgatgagtacaataaattaactggacaaagttctataggtgttataactggtaagccagttgaatttggtggttctttaggaagaacagctgctactggatttggtgttgctgttactgcaagagaagctgctgctaaattaggaatagacatgaaaaaagctaaaatagctgttcaaggtataggaaacgttggttcttatacagttcttaactgtgaaaaacttggtggtactgttgtagctatggctgaatggtgtaaatcagaaggttcttatgctatatacaatgaaaatggtttagatggtcaagctatgttagattatatgaaagaacatggtaacttattaaacttcccaggagctaagagaatatctttagaagagttctgggcttcagatgttgatatagtaataccagctgcattagaaaactctataactaaagaagttgctgaatctataaaagctaaattagtttgtgaggctgctaatggaccaactactccagaggctgacgaagtatttgctgaaagaggaatagttcttactccagatatattaactaatgctggtggagttacagtttcttacttcgagtgggtacaaaacttatatggatactactggtcagaagaagaagtagagcaaaaagaagaaatagctatggttaaagcatttgaatctatttggaaaatcaaagaagagtacaatgttacaatgagagaagctgcttacatgcattcaattaagaaagttgctgaagctatgaaattaagaggatggtactaagatttactcttaataaataataggatataattatttaagatataaaggggctgtacatagtacagcccttaaattatgtggcttacaatgaagtaagctatttttgttttaacttataaataacttgataaattatgtaatttagaatgcataaataagatgggtgaaaattaatggttgatttaattttgaatgtattttttaccaccacatgattacaaattagaggagttagattggatttttggacatgaacttatgtattttaaaagcaaagaccttcatttaaagtatctagtattatttttaaaaatagtatattggtttaatccatttatatatataatggaaaaatatatggatttggattgtgaactttattgtgatgagagagttttaaaaaattgtactgtacaacaaaagcaagaatatgctctaactattgtaaattcaatgaaaagaggtataaatttttcaaataaatttgtaactggattaaataaacaatctgatattagaaaaagagtaatgaacatgttcagtgaaaaacataaaaatggtatcttaatggctttgattataagcttgttttcttctattacattttttaaattcgattcaactagtcttattgaagagaatgatttcttagagaggtcaagatatgcgtttgaaggaaggcaagaagacatgtttgtaacaatagattctacatatgcagatgcacctataaaacttagaaaagagcatgaagaaaactgtagagtcaatggaatagtaccaaaagattcagattcaatagaaattattcctagattttataaagattgtatggatttaaaaaaataagttagacttaatattgatgttgatattatgaattttttatatttaagcaattgaaaattttattatagattcaattttatatgtgtttaagtatgaaatttatagatagttgaaataattaaatatgattgatgcataggaatcattactaagctataattaattataggggagtttaaataaattatgagttacacaattataaaatgataaaaaatagttatctgttacaaaaaatgtatctttttaattaataaagataatatgaaaacttaaaaggcaaataaacttaaacataaaatactcttaaataagataggagaaaaatgtatgtctaactttattctaaatgggatttttagaacagttatagtaagtagtctaagcattcttctgatattgattttcaagaaaaatgtatttaaaagatttagcaaaaaatttaattattatatatggatgatagttgttattaaattatttttaccatttacatattatacttttacaataaatatcttgagaagtaaaaaacacattaatattaataacataaatttagagggatttaataatgtttcaactataagtaataatattatattgtacacttggattataactgtagtagtgtatttaatttacactatatttaaatatataaaacttaaaaatttaataaatgacttatcttatgatgttgatgatagagagattgtaaatctttataaaaatatattagaagaatttaatataacaaaagatataaaactcaaatactcttatgaagttgaaacaccagcattttttaattcatgtgtacttttgccaccacatgagtataaattgaaagagttagactggatttttagacatgagcttatgcattttaagagtagggacctttatttaaaatatgtaatcctgtttttaaaaacagtatattggtttaatccatttatatatataatggataaacatatagatttagattgtgaactttattgtgatgaaagagttttaaaaaatcgaaattcagaggaaaaaaaggattatgctttaacaattctaaatgcaatgagaaaaggttcaaatacttcaaataaatttatagctggactccataagcaatctgatattaaaaagagagttatgaatatgtttaatgaaaagtacaagaatggtatattaatggcattaactttatgtttattatcttctattacttttttgaaggttaattcaacgagtattgttaatcttaatgtattacctaaaggatttgaagacttacgaactgttagcagtatacgtttttcagttataggatttacatatgcagatgctcctaaaaatatgagggaagaatataaaataaattgtgaatcattaggtttgatacctaaagactctgataaaatagaagttggtgtagaatattatgacagtctattgaatgattaaataaatattattttaacagatattaattataaagttttgaatagtaatttgttgagaaataaatatatccttataaaaatagatacttatataccaagaataaaaaatagttaagatagtacacaaggatatacttataaagaacttaaataagtgaaataaattattaattataaggtttataattttaaaaaattagataaattcaggtgtaaaatactataaaacacaattcggaaaagtgtatgttgaacttcatttaaaatagaattttcaaagttgttatagtaagtagtttaagcattcttcttatattaatctttgagaataatgtacttaaaaaagttagtaaaaaatttaactattgtatattaatgatagttgctattgatatattatctaaaaaaattaagtatgaaaagattactgctaggacaatcttttcatacttaattttttaatatttatattctccaaaattttcatctttttaacttagaattattagaatttgagaatcactattaggaaataggttttgatttatgcagggttaaaaatttcacagaatatctaactttatactaaatccatcaaaaaatatacgccatataaaagcgcataaaaaaacacataaaacaatatttatgcgcactttaacctcgaatggtacaaaattctttacttttacagacccatattatataattaagtaaataatgtatatttaggtgacatattggataagctaatttatttattttattaatataatgatactataaaagttatataaagtggtttacaaaaaagttacagatagagcttttattaatgtattgtgtattagtattttatccttaggtacacttcacctacaaaatagaatcataagataattatgggaaaattttaggaggtttatcgtgaagaaaaagatattaataccagtatttgcatcagttatggcattatcagtaagttcaattgtaaatgcagatgaagtaaatgattcatctcaaaataaggatgataaaacaaatactgaattaaatttaggtgaatataaagaagtaaaatataaagttgcaaaaataaaagatggagtagctataaagataagagaagaaggtcaagttcaaaacatagcttattctggagatgaatttacggttttaggaactcaaggagaatgggttaaggttaaagttgaagatggcgaaggttggttagctactagatatgtagatatatctgaaggtgtaggatatactaacgctgataaagtaaacttaagaaaagataagagtgaaagttcagaagtaattgaagagctggaaaaaggaagttctttattggttttggaggataatggagattggttaaaagttaaagatggggaaacagaaggatatgtaaaatcatcttatatatctgataaagctcctgtaatagaagagccacaagtaaacccaagtattgaccaaaatgtagattctacaaataataatcaacaaaacaatgcaaatactaatcaacaaaataataattcaaatgtgccaacagctaactctaatgcagttcaagctgtacttaacttggcatattctaagcaaggttgtccatatgtttggggagcagaaggaccaaacacttttgactgttctggatttacacaatatgtgtatagaaatgcagtaggaaagaatataccaagaacatctaaagcacaatctaaatatggacaaactgtaagtaaagcaaatttacaaccaggagacttagtattcttcacaactaatggttctggttctgttagtcatgttggaatatatgtaggtgggggtaatatgatacattcaccatcaacaggaaaaacagttagtgtaactagtataaattcatcatactatacagcaagatttgttacagcaaaaagaatattataatcggtttgtaatatgacaaattgataaatacataaatatatataaacgctctatattatatttaatttaatcatggaaacaaaaaatgattatattttaaatgtactatagagcgtttttgtatcactttaaatctaatcaagattcaagttaatatgactattaaataggagccttttcatatgatgattatttgcgcaatcccttgacaggatagggtaaaggtggtaagctactaacagtacaaaaatacttttaattttagttcagagaggctaaaaaaggaggacgaaagatgttaaaatcaagaaatttaatccaaccagaagacttttcaatagaagaaatagatgaaatattagaattagctcaaaaaataattgacaatccgtcaaaatattctcgtatatgtgaaggaaaactattagctacattattttatgaaccatcaacaagaacaagattaagctttgaatctgctatgaacagattaggaggacgtgtagtaggcttttcagagccaaattcatcctctgcatcaaaaggtgaaactctaggagatacaatgaggatagtatctggttatgttgatataatagctatgagacatcctcaatcaggtgcagcttcagaagcagctagatatacggaagtgccatttataaatgcaggagacggcaaaaaccagcatccaactcaaacacttacagacttacttactataaaatcattaaaaggaactttagaaagccatacaataggattatgtggtgatttaaaatatggaagaactgtgcattctttggttaaggctatggcaagatataaaaatacaaagtttgtatttatagcgcctgaagagttaaaaatgccagattatataaaagaagctataaagggacatgcatattatgaaactaataatttggatgatgttataggaagcttggatgttttatatatgactagagttcaacaagaaaggtttgaagataaatcagagtatgaaagacttaaaaactattatattttaaataaagctaaattagaaaaggcatctaaagatatgttagtaatgcatccattaccaagagtaaatgaaatagacatagatgtagatagtgatgatagagctgtatattttaaacaagctaaatatggaatgtatgttagaatggctttaataataaaacttttaggtataaatgaagactaatagttatcatataatagtaaaacaaaggagattttgggatgtataaaattctggaaaatatatatataggcgaagatatgtatagaatgaaagtaaaaggtaattttgaaggtaaaatgggacaattctatatgttaagagcatgggatacttatccagtactttcaagacctataagtatacatgatatagatgaagaagggataacttttctttataaagtagtaggagaaggaactcaaattttgagtaacctaaaggtaaatgataatataaaattagaaggcccttatggtaatggatatgctaaggttgatggaaaggtagctctagtaggaggaggaatcggtgtagctccactatatttggttgctaaaaatataaaaaattgtgatgcatatcttgggtttagagaagatgttatattagaagatgaatataagcaagtatgtaataaagtctatacaacagtaggaaatacttttgtaacagatataattgatgttgagaaatatgattatatattaacatgtggtccaactccaatgatggaaaaattagttaagatggtagaaggtactaaaacgagaattatggtatctcttgaaaaccatatggcttgtggagtaggtgcctgtttagtatgtacgtgtaaaactaatggaggaaacaaaaagacttgtaaagatggtccagtgttctggggagaggacgtgatttttaatgggtaatttaagtgtgaaatttggaagtgtagaatttaaaaatccagtaataatggcgtctggaacttttggatttggaaaagaatataatgagatttatgatatacaaaaacttggtggtataagtagcaagggtcttactttaaataaaaaacctggtaacaatggtatgagagttcatgagacaccatccggtatgatgaatagtgttgggcttgaaaaccctggagttcaaggatttatagactatgaattacctttttttagtaaactagacttagtcagaatagctaatgttggaggtgggacattagaagactacttattaggggttcaaatgttaaatgacaagcctatagacattattgaattaaatatatcttgcccaaatgtcaaagctggtggaatggcttttggtataaaaaatgaagtggcaagagaagttgttcgtgaggtaagaaacataacgaaactgcctttagtaataaaattatcacccaatgcagaagatattgtaggaatggcaaaagtttgtgaagaagaaggtgctgatggagtttcattagttaatacttttaaagcaatggcaattgatataaaaaatagaagaccagtatttgaaaatgtatatgctggattatctggaccagctataaaacctatagctttgagaatggtacatgaagtgtgtaaaaatgtaaatatacctgtaatgggaatgggcggaataactaaagccacagatgctatagagtttataatggcaggagctacttgtatccaagttggaactgcaaattttatgaatcctagaataggtattgaaataatagatgggattaatgaatttatggatagagaaggaataaaaagtttagacgaaataagaggaattatataaggtagaataaatagtattttaaagataaaaaatatagattaaataaacaataattttataacattaacatggaggaaaaataatatgagtaaagtagatgtagtggatatattaaagaaaagtgatgcattgttggagggacattttttattatcttcaggaaaacacagtaatagatacgtacaatgtgcaaaagtattaagatttccagaatatgctgctgaggtattaagtacagttgttgaacaaataaaagacttagatatagacttagtagtaggaccagctatgggtggagtaatagtttcttatgagttaggaagacaattaggaaaagaagctgtatttactgagagaaaagacaatacaatggagttaagaagaggatttgaagttaaaaaaggagcaaagataataattgctgaagacgttgtaactactggtaaatcaactatggagacaaaaagagtattagaagccttaggtggagaagttgtaggtgttgcatgtatagcagatagaactaatcatgatataggtatgcctatatatagtgctataaaacttgatattcaagtttatgaatctgatgagtgtcctttatgtaaggaaggaaaattaccagttgttaagcctggaagtagagagttcaaggaattagggatgtaataaaaacttaattatttatagtgttacttaaaaaatgtaaattttttagagtaaaaatttgtaatataacatataacttaaaaataaaaagcagttagccttataaatgaaggttagctgttttttttgttaaaaatatatttacaaaataagagatagtagcagtacaatataagtataaggtaaaagtattatatattagggaggggtaagtatgaaaaatcaattaaatgaaaatcataaaaaggttgtattttttggagtaggtgctgtaggagctacttttgcagaacaattttttaactctaaatatgattttaaaattctttgtgataatgaaagaaagaaaagatatttagaagaaggatttataataaatggaaaaaggtatgattttaattatgtaactaaagatgagtataaacaagaggctgattttataattataggtctaaaatataataatttaaaagaaaatataaaagaattagatggattagttggaaaaaatacagttataatgtctctgctaaatggagttgatagcgaagagataataggagaaagatttggaattggaaaaatggtatattcatatgttaccaatatagatgcaaagaaaatcaataataatattatacacactactaatgggataattgtatttggtaacaaagataatagtgaagatagaaaaactaatataataactgaagtctttgatgatgtaaatatagaatatattttatcaaaagatattcaacgagatatgtggtggaagtacatggttaatattggtgtaaatcaaacttcagctatacttggtgcaccttatggagtttttcagagttctgagcatttaagagaattagcaaaatctgcaatgagggaagttgttgctatagcacaagcaaaagacatatctcttacagaagatgatgttgaaaattcattacatagaatactagaacattcaaaagaaggaagaacatcaatgcttcaagacgtggaagctcatagacctacagaagtagatatgttttctaagaatatctgcaaacttggaaaaaaatatagcatacctactcctataaatcagactttattttatatgataaaagtaattgaaagtagattttaaagggtatttgtaagaaatattgataattattgattttaaattttattaatgttatatactatttaagttactaaatatttttaactcttcaatgaaaatagttgctgcttttgacaaagttatatcttttggaaatatatatgagaaatgtctgttgtagctgcttccaagctctatgacagacagctcattgtttaaaacaggtaagcttgtcactagattagaaactattgtaattcctaaattatttctaacagattctttgacagcataattacttccaaaaaccatcatactttttggaataatttctttaacacttaaaaacatatctaaatagtctctggttccagaaccatcctccctgactatccatttttggtcttgaagtttatcaaaactaaaatcttttaataaatgactattgtatggaagtgctaaaaccatcttatcttcaaaaaaatattcttgaataaatgaaggggaagagcaagtgccttcaataagaccaatgtctaaaatataatccttaacatgagaagatacgattgatgtattttttataaaaacttctacatatatgtcaggatacttttgagaaaataatgctaaaaaatttggtagaatatattctccaatagttaaacttgcaccaatctttaagtgaccagttatagcatctgaaacttggcttacatcatgataagtaatatttaaaagatttaatatttctttagctcttttgtacaatatttgtccactttctgttataaaaatggttttttgtttaatagacctgtttataagcacaactttaaaataattctctagattttttatgtgtttacttacacttggttgtgatagatttaagtattccccagctttagtaaagtttttgtattcaacaacagctacaaatgtttttaattcttcaaacaattttttgtctccttcacctaatgaaattttacattttttatatactttctacagataattatactatatataataaccattaaaaacattaatcattacgatattatatatttattttacttatggttattacaattatatactattgctatgaagaaaactatattaattataaggtaggtatattatgttaaagaaaaaaagcagtttgacattaaaaactataagggaaatattaccaggactgtttatatcagtgttagtaggttatattagtatatttatttctattttaattcctaaggtaggggcagcatcaatttctatatttttaggtatgtttgtaggaaacctatttttaaatcaaaaggtatttcaaaaaggttataaattttcagagacagatttgttatcatattcaatagtactattaggggcaacactcagtgtatctaccttaatagacttaaaagtttcaggaattttatttataatattgcaaatgacaataacaataatagctgcactttatataggtaaaaaactaggatttgaagaaaactttagatttctaatggcaagtggaaatgcagtatgtggttcttctgccataggagcaatagttccagtggttaatgcgacagataaagaaaagggaattgcagtaactattgtaaatgttactggtatattccttatgtttttacttccaataatatctcaatttttatatagccatgaacttgtaaaaacttcagcaatgataggtggaactttgcaatcaattggtcaggttgtagcaagtggagcaattgttggagaaaatgtaaaagatttggctactatttttaagatagtaagagtaatatttctagttgttgttgtattagtatttggacatatgaaaaatcagtctaatagggaaatccttgaagaagaaaaggatgagataaaaaagaaaaaagtaactataccatggtatgtaattggattctttataacttgtgcacttttttcaatgaacattataccaaaagaagtatctgtgttgtgcaaagaaataagtaacaaactagaaataatagctttagcagcaattggattaaaagttaatgtaaaagatttagtgaaacaagggaaagaagtttctttatatggtttatttgtaggtacagtacaagttgtatcagctgtagttttaataaaaatatttatatagcacaaaaatagtatttgtaatattaatttgattaattaaaataatatgatactaataatttataatataaataaaaaatgaatttcgataagtttaagtgggtataaacttatagaaattcattttttatttaaggtaaaaatttaaagtaaaatattattttacataataataaccttataaattttgaaattacttatctttgtgttaaaataagtaaaatacacatattaaagttaagtttttaggcaaataaacaaaatgaaaatataaatattaaggagatttggtatatgaatgtttatgaaaaaggtaatggagttatactagaaggagtaacagattttgacccagtacatatatttgagtgtggtcaatgttttagatggcacaaacaagaagatggctcatacactggagttgcaagggggagaatattaaatgtcaaaaaagagaatgataaaatatatttaaataatacgaatttaaaggagtttaacagcatttggtataattactttgatttaggaactgattatacagaaataaagaataagctaaaaaatatggatgaatatttgaataaggctactgaatttggatggggaataagaatattaagacaagatggatgggaaatgcttatatcatttataatttcctctaataatagaattcctatgatacaaagagcgatagaaaatttatcaagaaagtttggtaagtatataggtgaatatgaaggtaatgaatactatgcattcccaacaccagaagaactaaataaggcctcacaagaggaaataagagcatgtcaaacaggttttagagataagtacataaaaagtactacacaggcagttatagagaataatgatgaggtatctgaatatacaaatttaagtacagaggattgtagaaaagagcttttaaaatttaatggagtaggaccaaaagtatgtgattgtattgcattatttggtatgcaaaaatatgattcttttccagttgatgtttgggttaagagagttatgcaagaattttatatagatgaagacatgagtttacctaaaatgagaacttatggaatcgataaatttaaagaaatgtctggatttgctcaacagtacttattttactatgcaagagaactcggtataggaaaataaattaagggggagaaattatgggagtaataggaacaatatttctgttctatttaattatatcatatctagctggagccataatttctgtgattatattgcttgaaaatagagaccctgcaaaaacaatgtcttggctattgatgtttattatatttccaggtgtaggtttaatgatatatgctatttcaggtagaaatattagaaaaagaaaattatttaagactcaaaaactagctaataatataaaagaaaagaaactatttgatacattagaaaagataacagaaatagttgaattagaaaaagaatctataaaacaaaataagcttttaagagatgaagaggatggtagttatagaaaaagggtaataaatatgttgttaaagactggtatgtttccctttactaaaaataataaagtggatgtatttgtagatggaaatgaaaagtttaaaagacttatagaagatataagagaagctaaagaccatattcatttagagtactttatcatcaaagatagtgaaataggtagggtgttaaaagaagaacttataaaaaaggctaaagaaggcattaagataagaattttatatgatgatgtaggatgctggagattttggtttaatagaaaatttttccgagaaatgagggaagtaggtatagaaattgcagcatttttacctacaaaatttcctataataggagggaaattaaactatagaaatcacagaaaaattgttgttattgatggaataattggatatacaggtggaataaatataggagatgaatatttaggcaaaaatgataagtttggatattggagagatactcatattaggattaagggtatttctgtatacatgcttcaaatgacatttctgattgattggtattatacgacaaaagaagtattagtgactaaaaattatttcccaagtgtagggaatgttggtgaaagtatgatacaagttgttgcgagtggtccagacagtgactgggaagatattcattatgcttatttttctgcaatatgtcaggctagaaaaaatgtttatatagaaactccatattttattccagatgaaagtctactaaaagctataaagagtgctgctcttagtggagttgatgtgagaataatatttcctaaaattgcagaccacaagatagtaaatatagcatcttattcatattttgaagaaatattaagagcaggtggtaaagtttatttatataataaaggatttatacattctaaagtcgtaataatagatgataaaattgcttctgcaggtacagctaatatggatttaagaagttttatgcttaactttgaggtaaatgcatttatctatgatgaagaagttattagggtaatgacagatgatttctttgaggatttaagtcactgtgaagaacttaatttggaggtatttaagaatagaaatatcatacaaaaaatcaaagaatctgtagcaagattattttcaccaatattataaaaaattattaaaaaaggtattgaaaattatgtgtgattggtatattataataattgttagcactctattagatagagtgataataaataaaaagtatatatataaatctacatatataagtagtattaatttaaaaataactaaaaacataggcgaactagtctatacttaatattttaggaggcgtgaataatgaaaataagaccattagctgacagagtagtaattaaaaaagtagaagcagaagaaaaaactgcaagtggaatagttttaccaggagcagctaaagagcaacctcaaatagctgaagttgtagaagttggaccaggtggaatagttgaagggaaagaaataaaaatggaattgacagtgggagataaggttatattccaaaaatattctggaacagaagttaagatagaaggacaagaatacacaatactaagacagagtgatgtattagctgttattgaataaatatagaataaatttattaggagggatttaaaatggctaaagaaattaaattttcagaggaaacaagaagagctttagaagctggtgtaaataaattagcagatacagtaaaagtaacattaggacctaaaggaagaaatgttatattagataaaaaatttggttctccacttataactaatgatggagtaactatagcaaaagagatagaactagaagatagatttgaaaatatgggtgctcaattagttaaagaagtagcaactaaaactaatgatgtagctggagatggtactacaactgctacagttttagcacaagctataataagagaaggtttaaagaatgtaacagcaggggctaacccaatacttttaagaaaaggaatacaaaaagcagtaatagtagcggtagaagaattaaaaaatcaatcaagaatagtagaaacacaagaggctatatctcaagttgcttctatatctgctggtgatgaagaagttggaaaattaatagcagaagctatggaaatagtaggtaaagatggagttataactgttgaagagtctcaaactatgaatactgaattagatgctgttgaaggtatgcagtttgatagaggatttgtttctgcatatatggttacagatgtagataaaatggaagcagttttaaatgacccatatatattaattactgataagaaaatatctaacatacaagaattattaccagttcttgaacaaatagttcaacaaggtaaaaagttattgataatagctgaagatgtagaaggtgaagcattatctacattagtagtaaataaattaagaggaacatttgatgtagtagcagttaaagctccaggctttggagatagaagaaaagaaatgcttcaagatatagcaatacttacaggtgctcaagtaatatcagaagaattaggttatgatttaaaagaagctgatttatctatgctaggtagagcttcatctgttaaggtaactaaagaaagtactacaatagtagatggttctggagataaaaaagctatagaagatagagtaactcaaattaaacatcaagtagagcaaactacttcagattttgatagagagaaattaatggaaagattagctaaacttgctggaggagtagctgttgtaaaagttggagctgctacagaagtagagttaaaagaaagaaaattaagaatagaagatgctcttaatgcaactagagcagctgtagaagaaggaatagtagctggtggaggaactgcttttgttagtgttataccagcaataggaacactaattgagagtttagaaggagaagttaaactaggtgctcaaatagttaaaaaagcgttagaagagccattaagacaaatagctataaatgctggtcttgaaggtgctgtaattgtgcaaaatgttgttaattctgaagcagaaactggatttgacgcattgaatgaaaaatatgtaaatatgatagaagctggtatagttgacccaactaaagttagtagaagtgctttacaaaatgctgcatcaatagcaagtactttcttaactactgaagctgctgttgctgaccttcctgaaaaagaagatgcaggaatgccaggaatgggtggcggaatgcctggtatgatgtaatttaaaaaatttaaaatataaattttaatataaagaactatttcgacttagattttaaactctaagttgaaatagttcttttgtatatatctaatttttgtatatctataaattcaatacacatatttagataatcagtatctagtttgtaataatattttagagtagtattgttattttttaggttatgattttagatatatattaattaaggtataattgttgatagagaataaatcaaatttaaaaggatgcgataatatggacttaagaaaattacttgaagaagttaaaaatgaaaatattgatatagattttgcgttagaaaagttaaaagatttaccttatgaagaccttggatatgcaaatatagaccatcatagagaattaagaaatgggtatccggaagttatttattgtgaaggtaagagtgatgagcatattttagggattattgataaaatgaatcaaaaaagttctaacatattggggacaaggtgcagaaaagaaacttttctgaaaattaaagaaatctataatcatgctgagtacgaagaggcgtctaaaattcttaagattcaaaatcatgatatagagaatataggaaaaggtaaaattgtgattgctacagggggaacttctgatataccagtagcagacgaagcttatcatacagctaagtttttaggtaatgatgttgatagaatatatgatgttggagtggcaggtatacataggcttttaaataaaagacataaaatagatagtgctagagtaatagtagccgttgcaggtatggaaggtgctcttgcaagtgtaattggtggactggttgatgttccagtaatagctgttccaacttctgttggatatggagcaaattttggaggattagcagcattactagctatgttaaatagctgtgcatctggaatatctgttgtaaatattgataatggatttggagcaggatatttagcatcaatgataaataaactgtaaatacattgatataaattaaacaaaactatataataaaatttaatttctattatatttttactattaaaattgaggagacatatatgagtgaaaaaatactttattttgatataataagcggtatatcaggggatatgacccttgcaagtttattaaatttaggtgtgcctaaggaaatttttttggaggaaattcataaactaagaatgagcgatgaatttaatataaacatcagctcgaaaactgaaaatggaatagtaggtacaaaagtagaagtaattacaaaagaaaaacatacacatagaaatttagtggatatatttgaggttatagataaaagcactctaaacgaaaatgtaaaatctaaagcaaaaaaaatatttatggtaattggagaagcagaagcaaaagttcatggaactacaatagacaagatacattttcatgaggtaggggctatagattcaattgtagatatagtaggagcttctatattagttgacttactttgtgtagataaagtttgtgctagtacagtgtctgttggttcaggatttgtaaaatgtgaacatggaattatacctatacctgcacctgcaactatagaaattttaaaaggtgtgccaattaaattaaataatgtaaatggagaatgtacaactccaacaggagctgcaatcataaaagtcttgtgtgatgagtttgtagatgagcttgaattttctccaaagcaaattggatatggtataggtcataagaagtttgaagtaccaaatatactcagaactgtattaggtgaaaaaaaaaagaagaattaatttatgaaattagtgcaaacattgatgatatgtcttcagaaatctattcttatttgtatgaaaaaatattagatgagaaagcattggatatttatacagagagtatttatatgaagaagaatagaccagcaacaaaagtatcaattttatgtaatgaatcagatttagaaaagtttattaaaatattacttttagaaactagtacttttggagtgagatataatgcatataatagagaaattttagagagaaaatttgtaaaattagatacaaaatatggagtggttacagtaaaactagggtattataaaggaaaactagtcaaggttactccagaatataatgaatgtaaaactatagcaaaaaatgaagatattcctataaaaaaagtgtttgctgatataaattttagaataaaagaagaatttagtgaaaacttattgacataagtaataaattttgataaattaatattcagccttattaaataaaagtaaacagaaaaaaatatataaaatataaactcactcgtatatgctcagaaatatggtctgagagtctctaccaagataccgtaaatatcttgactatgagtgaaattattataccaaaagacctagttaagtaaatgtgtaggctgagttatactccctatgtgttggctataagataaaggtattttggaagcctgtatagtaatttcacttttgctagaaattatggaagttactatacaggttttttgtgtaaaaagatttaatataatttagactgtattgtgttaaaataaatatataaaaactatattatacaaggagagatgtgaatttatgaaacatgaattagtacttgtaatagattttggaggacaatataatcagttgatagctagaagagttagagaaaacaacgtatattgtgaaatacttccatgtactgcaagcatagaaagaataaaagaaaaaaatcctaaagggataatatttacaggcggtccaaatagtgcgtatttagaagattctccaacaatatcaaaagaaatatttgaactaggagtaccaatacttggaatatgctatggtattcaaataatgtctcatgtattgggtggagttgtaagaaaaggtaataaacaagaaaaggaatatggaaaaacatctataacttatggaaaatcatcattatttgaaggaataactacaaatagtgtatggatgagtcatacagatttaatagaaaaagttccagaaggatttactatagttgcaaatactaatgattgtccagtagcagctatggaaaatgtagaacgaaacctatatggagttcaattccatccagaggtagaacactgtttggaaggggacaagatacttacaaacttcttatataatatttgtaaagtaaaaggtgactggactacagattcattcatagaagataaaataaaagaattaaaagaaaaaataggcgataaaaaagctttatgtgctttaagtggaggagttgattcttctgttgctgcagttcttattcataaagcaattggggacaacttaacttgtatatttgttgaccatggtttacttagaaaaaatgaaggaaatgatgtagaaagaatatttagagagaaatttgatataaatttaataagagttaatgcagaagatagattcttatctaaattaaaaggagtttccgaaccagaagctaagagaaaaataataggtgaagaatttataagagtatttgaagaagaatcaaataaattaggaaaaatggatttcttagtacaaggaacaatctatccagatgttatagaaagtggacatggaaatgctgctactataaagtctcatcataatgttggtggaatcccagaagatgtagacttccaagaaattgtagaaccattaagagagttatttaaggatgaagttagaaaaataggattagagcttggtatagaagaaggattaatatttagacatcctttcccaggaccaggtctaggaataagagttataggtgatgtaactaaagaaaaatgtgatatattaagagaagctgatgctgtttatatggacgagcttagaaaagcaggtttatacagagaaatatggcaagcttttgcaacattaccagatgttaagactgttggagtcatgggtgatgaaagaacatatgcttatttagttggtttaagagcagttacttcttctgatggaatgacttctgactggtataagatgccttatgatgtattagaaagaatttctaatagaataataaatgaagttgatggagtaaatagagtagtttatgatataacttctaaacctcctggaactattgaatgggaataaaatatagaatgccagaaatccacatgaatacaggatttgaggtctctcttacttctatattatactggtttgatactatcaatatttgccagtatcttatggattaataagcaaaaaacatcctgctgaatggtaaattcggcggggtgtttttattttgttttgaaactcctttgctctgaaactcgaagtatttaacactgatgatgttgttatcttttagttccttttgtgtcatgctctgaaagacaaattgatacaataaaaaagtaatttcttaatcattgatggagatatgtatttatgttactcttgatggtaatttgagtaatattgttcatagctttttatattcacttaattagaaaaccatttggtataatcataaataaacttgatgatataatagaaaagatttataattattagaagtatataaaagtattttatgtctatgaaatgtatgtctataaaacatatagatgacttttgtatattaatgtatgaatattgatattatagaagaattgagttgtcaatgatactaaatcaaatatttatagaagatggagggattatgagaaataaaataattataggaattactttttcacttgtattactaatgtctggatgtgcttcaaaacaaacagcagaaataaacgtattagcaactactgatttacatggagttataccttatgagttaacttcttatgtaaaagaagaaagaaaaaaagataaaaatctaactttagtagatgcaggagatttttttgatagtggagaagtgtttggttctagcatggatagttattttagtgctagatataaagatggtgataataacactgaaagttatattgagacgcctatttcaaaagatatgaaagaggtaggttatgatgttgcagttcttgggaatcatgaatttatatccaacaataaattttatctagataatatgatatctgattttgagaaacaaaaaataaatattttatcggcaaatacgtataaaaaaaatggagatagttatacaaaaccatacataataaaaaatattaatacacctgaaggaaacgtaaaactaggaattttagggcttactataaaagaagttggtgagaggaaacagtggaaagatggaaaacttgttgactctaagtctttagaactaaaagaccaagagggctacaatggtgaattgtatatgaatgatttagtagaagatgctaaaaagtgggttggtataatggaaaaagagaagcctgacattatagttgctgtggcacatacaggtgagaaacctaagaaacctagaaacccaggaaatagaatacaagacttagctcaacaagttgatggaattgatgctatagttgcaggtcataatcatgttcaaattgagcaacatgattataaaaataaatcaggagaaaatgttatagttactgagccaggaaagcatggggaatatatttctaagattaattttaaattagaaaaaaacaatgataaatggaatatagttgacaaatctagtaaattaattaaatttgaaaaaaatcaagaaagtgataaatttggagaatttatttcttcaattaataaagtaagtaaagataagaaagaaataagattatcagaagtaaagactcctgaatgggataaaatatatgtttttaaatctggaacatctgcagatgatatatataaaacaataggatataaatggagaaatatatcatctccaaagggtgatgacatggtgcagattgttgtaatgaataataataagcctgttagctatatatatggtgaagctgaagttatgccaattaatataaaatgtgatgaatcagagtataaaaataatgttgtaactatttatcctaataaaaatgataaatttaaaattgaaaaaggtaagcaagaatatagtattaatttaaaacatatacaatagaaacttttatcttatttaagtttagattgtacttaaaataaagtgtgtattattttaaaaagtgatgataattaaaatcacaacattaaggaatagtacacactttttatgctaaaaaatagaatgttaaaaaattaaacctttaaattaaagtacattgcttatattatccaatattatttccaaaggttgtgtaatatttttatccttatgtaatattgctaacattttattttccatatctatctcatctaattcaatcaatcgcaattttttatgtaagagtgaatctaataataaattttctggcaaaatggttatacctaaccctgcttctgcagctttaataagtgcaaaagaattaacactttcccaaacaggataagctttttggtttgaaagagataatacactgtccaaagtatcgcgaatagcacttccttgttcacgtaacaataacggaaacgtgcataactgtcgtagagataaggtttgttcagataaaggaaaagttggagcacatgcaacacataacttataggaacctaataaaattgtacggaatgccccctgtggttctataccttcccaaaaacatatatcagcttctccactttttaaaatatccatagctgaattagcactttcgacacgtacattcactttaagagatggaaatgaattttttagtcgacttaaaattggtggaagtaaaaaagaggcaattgtaatgctagaaacaatgtttataggtgtacattcttctaaacgactgatttttttgtctaaattgcgacaagcagttaagatactacgtgcttcatctaaaagagaaatgccacagcgagtaagacatacccctcgtggtaatctgtcaaatagtgatgtttcagcttgttgttcaagttcagctatagcatgagatacagcagattgtgtgatatgtaatttttttgcagcacctgtaaaagtgcctgtttgttcaattgcttctaaaatctctaaatatcgtatgtttatcataataaatatcctcactatacatgaataaaattaattaattccattaaattctatcattttacagattgcaaagcaacaggtatactgaataatatgaagtgaaaagaaggaggaatattttgaatcaaagcagaaaaatatatttttggcttttaattattaacttgtttattagcacattcacttttggcggagggtatgtagttgtacctatgattagacgttattttgtaaatcaaaagcaattctttacagaagatgatttgatgagtatggcagcagttgcacaatcaactcctggagctattgcaattaatttatctgctttggcaggttatcgagtagctggtactttaggggttgtcattagttgtacagcagctataatacctccactcgttattcttggattagtatcagcattttacaccacttttatatctaatgccattgtaactgcagtattaaaaggaatgcaagctggtgttgctgcactaattgtggatttgattattgacatgtgctctatgatattaaaacaacgttctttgtttttatcaactatgatacctattgctttctttgcaaactttgtgatgagtataaatgtaatttttatattatctgtttgctgttttgtatgtgtaatgcaagttttctataagaagagggaaaataaatgaatacaatttggaacttattttttatatttttaaaaataggcttgtttagtattggtggtggttatgcaatcatacctttaatccaagagaaagtagtaaatcaaactggatggataagtgagaaaatgtttacagatattataactatttcacaaatgacaccagggccactggctgttaatacttctacttttgttggacttcaaattggagggttttggggagcagttgcagccactttaggttgtgtattatgtggtgtagtaatatctctatttttatataatttttttcaaaagcatcagaactctacttatatatttgaaatattaaatggtctaaaatcagcttcattaggtttaattatctcagctgcggctacaattataatccttgcattatttgggacgaataaagtgtacttcaattctatatttgagatgctaaactggactgcactaataatcttttttgttatactactgatagtacgtaagtggaaaattaatcctattgtgattataataataagtggtatactaggaatatttttttatttataagtttttggtaagtaaaggatatctatttttttatatcttaaatccaaatagccaataaagtaaggctatttggatttttaataaattctgaaaagataatcagaaacccatataacatttaaattatatcactggttttctacaaaccaatcataagcttcttggcaaaatttctcactatctatatagtaactattatgaacattattaatttcaacaagtttctttttacattttagtgaattataatagctatcaaaatattgggttttaaaatatctatcatgaagtgttttaaagacaagagtaggtatgttgactccatcttttatcttactatcttctgcaataaagcattctaacattgtattaattatctttgtactatttttccaaatatgaggatttttcttttcaaatattttataaaattcattatcatagacttcattataacctttatatttaggtggttttactgttatgtgaaaattaggaagaaacttaaagaaaaaatataataatttttatgttctgttttatatattattcatattttatcacagataatatactaaagttaatttttttattgtacaactattataataattcttctataatataagacattctataattttatatttaagttcatgtgtatttaattgtttttatataaaatgtccagtaatactatttggatttatttttatttcatcaggagttccagaagcaacaatttcccctccatttattccactgtctggacctatatcgataatccaatcagaagcacgtataacctctgtattgtgttcaataattaaaagtgaatgctgttcatttacaagttttctaaaagtaatcaacaaattttctatatctttaaaatgaagtccagtagtaggctcatccaatatgtacagcattcgttttttagtttttgtccctaattcttttgctaattttatcctttgagactctcctccgcttaatcctaatgtattttgtccaagctttagatatccaagtcccacttcatctaataaggagagttttctatatatatcagagcaatcactaaaaaatgtttttgcttctgctacttccatgtcaagtatatctgcaattgtttttcccttgtattgtatagacagtatttctttttgatatctcttaccttgacattcattacaagttacccattggtctgccatatattgtagaataatttttgttttacctaatccttgacagtttgggcattgcccctttttgctattaaagctaaaatagctttcatccaataatttttgttttgcttgtggagtttcagtaaatagagaacgaatttcatcaaaaatattgatatatgtagcaggtgtagaacggctagattttccaataggtgtttggtccattaagataaaatcgtcaatagcatcaaatccagtaagtgcagtataatttttatttgggatagatttttgtttcaatttttcttctagagcaggaagtaaactgtgaaatacaagagaactcttaccagaaccactaacacctgtaatagagcacatacagtttaagggaatttctacatcaatattttttaagttatttgcatggcatccctttaagcttaaccatttacttggtataattttattttgtgaacttatcttattgtatgtactcaaatatttgcctgttatagaatttggattttttataatttcttgggttgtaccttctgcaatgatgaagcccccttttgtaccagcatttggtcctacatcaataatataatcagcagacagtattgtatccttatcatgttccactactataacagtattacccttgtctcttaattcttctatcattttgatgattagattatggtctcttggatgtaaaccaatagatggttcgtctaaaatataggttaatcctactaattcacttcctagctgacttgataatcgtactctctgcagttctcctccagataaagttggagctgttctatctgttgatatatagctaagacctacctttaatagataactaactcgaatttttaattctgttaagatatcatttaccaaagatagctcatttttttgaagttgatttggtaattcacacaaccaattccataactgttctatcgtcatttttgttagttcagggaagcgataacctttgattgtagtgaatctagcctcaatgcacagcaattcgccaccacatgtattgcaaggaattttgttcatatattgatgcaaggtattattttcagaactagattctctaaaaagtctttgaatgtggttgattgctcctgaagcaggccttctaatctttgattctcgtccctttgattcaaagctaaattcatatatcttatcgtctgtaccatataagattgcatctataaaatctcttggcaattcattccaaggtatatctaggtctatatttttatcttttgctattgcatataattcacctaccatccaattaccatttggctttttccccctcaattttccaaaatagtaagtagctccatctaatattgaaatagttgggtcttttacaattaattgaggattaacttgataggtaaaacccaatccattacaatcgtgacaagctccagtatgggagttagcattgaaggttgaagtatttatcttagaaaaaatagtttggcaatgtggacaataattttttgtattattctttttttctaatggagttttgcaatatggacagtaactttttccgattgatacaaataacattcttaagtaatcccaaatgcttgtaagagtaccaacagtagaacgaggattttggcttccttttttctgttcgatagctatagtaggggttaatccctgaagtaaatcaaattccggtttttgaagctgttctgaaagttttgctccattacctagattttcaaaataacgtctttttccttcttcataaatcgtatcgaaagctaaagaagattttccactaccacttacacctgtaataacagttatttgattttttggaattgtaacctcaacatcctttaaattgttttgccttcctccttttagatagatagagcttttattatgacaaagtgaatttttaattgatttatttattgcttttgcaaatttgaatttcttttctagttcaagaggattgcctaattcttttatttccgaaatacctaatatttttaactgagaaaagattgatttcaaataatcttcaggcaatttttctattaacaaattaaggtcttctatttttatatttccgcttgataatatctctgccatttcatctaataaatttttttctgctcttgttaattgattgtattttttggaacttaattctgtccataaatcccatggaagcaattctaaaccaatcatattattaaagtcatgtagaagattaccctttacagaatgccaacctttccaatttttattatatccaaagtcatctggatgagcatgtccttgtcgacatcttatccaggcttctgaaccagttaaaaaaccatctgtttttccgacatcatgagtgtcaaaattaatttgaaaataatttttttgtatgtcatctatttgtgcatctattcttatccatctctttgttagagtatcatagtattctacaagccagtggtcttcataagtaagctcattttcaaaataattagcaaaacctgctctcattctagcctcaaaacctcgatatcttaggagcgatacaagaagtaaagaataatctctgcacattccaacaagcctttgttttgggtttcttggaatagttagtgggttagaatttatttcaaatattctttttaacatttgaggaattgtacgaagcaattcctcatcagattgttgcttattaaaggatataccatataattttccttggtctccatgaattactaggctttgaaccacttttaataactcaattggagtctttggtaaatcttgatatttattttcaaattttttaggatttgtgatgatgctttgatttttatagttatttattttcatttatatttcacctctctaaatggatgatataccctgacatggtgtcatatgcaaggacaatttagattttttggccaaaatttaaaaataaataaaaaatgatacagtgataaattgtaatacaaatatagtttcaaattgcatataatataattatttaataaaaccattatctatggaatgttaatgaaatgttaagatggcattcttgaatattaagaaatagaatactataatatagtgtgaaggattcttagtaaaaaaatttgtaagtgttaatatacattaaaaaataggtttataatttggaggaaaaaaatgaaattatcaaggtataagaaaaatagtttagttctgtctataattttatgttcacttattatttcaatccttgtaattactgtttttaataccgtaaaactacacaatatatctaataaacaatctaaaaactatttaaacgatgtatctacacagattgtaatgaatgttgattctaaaatcaaatttattttatccgacttaagaataatggcagattttattaagcaatatgaaggtgatagtcgatatgagtatttatctaaaagaaagactagttataagtattatgatgttggaataatagatttagaaggtaaagctgagtttttaagtggaaaaaagtttgacttaaagaatactgcttcctataaaaaaggaattgaaggtaaagaatactcagaagtaatagagtcaatgggttttgttctttatagtgtacctatatttaacgataatcatgaagtgtctagtattttaataggtgtatccaataaagaaagcatggatgagattcttaatatagatagctttaatggagaaggaactattgaaattattaatagtcagggaaaaactcttttcataggaaaaaataatgagttaataaaagaccttagctataagtataaggattctgcagatgaaccttgggcacaaaagatgcttaatgattttaaaaatgataaatcaggaaatattacaataacctcatcaaaaggtgtacaatgcttattaacttatcatccaattacaagaggtttaaatgattggcattttcttctcatagtacctgaagatgttgtacttggtgaacttaataagttaaattcttttacaataataatgacatttataactacatgtattattggaattataacattaattttatatattataagaagaaaatatgtaaatcaaatagaaaatattgcatatttagatagtataacaaatggtataaattcaactaagtttagtatgctagtcaaacctttaatttcagaatcacctgatagtacttatatgatgatagcaatgaatataaaagattttaagctaataaatgattgtttcggtagtgaaaaaggaaatatgacactaaaacatctttacaatattttgtataaaaacattgatgaaaatgaagaatttgtgtgccgtcatgatgcagaccttttctatttgcttattaagaatagaccagtgttagaagccctggagttattatataaaatagaagctgacacaaattattttaataaaaatagggaaaatccatactttttaagactatcagtaggtatttacacaattgaaaatcataatgaagatttaattacaatacaagaccatgcaaatacagcaagaaaaagctttaataaaactcatcaaagtgatttttctttttatagtgatatagaaagaaaacgattaatatctgaaaaagaaatttcaaatttaatggaaaaagcccttgaaaataaagaattttttatgtgcttacaacctaaaattgatataaaaagtggaaaaattagtggagcagagtctcttgtgcgttggaaaaattcagaaaagggcataatttatccaagtaattttattcctcttttcgaaaaaagtggatttatatgtaagttagatttatatatactagaagaaacatgcaaattgatttctaagtggataaaagaaggtaaagaagtgttgagaatttctgttaatgtatcacgtcaacatttgaatgataaattgtttttagaaaaatataagcatatatgcaataaatacaatgtaccaacatgtctgatagatttagaacttaccgaatctattttcttagaaaatccagaagctatagatataatagaggatattcattctaatggatttaaatgttctatagacgattttggatttgggtactcatcattagggatattaaaggattttaaagttgatataattaagttagaccgttcattctttgttagcaaaaataatatagaccgtggtaaggtagttattaagtctattattgaacttagcaaaaggctaggtatgaaagtaactgctgaaggaattgaagaattagaacaagttgagttcctaaaaaatgtaggatgtgattatattcaaggttatgttttttctaaaccattattaatttctgattttgaaaattttgcatatgaaaataataaaattaaaaatatccattattaaatgtacaagataaaaaatttaggcaagttatataattaaaaatataacttgtcttttttatttatatatttaataaaaatatatttgcagattttgtaaaaataattttcaaatgttgtaagttgtggctaaagctttattgtattattctgaatatagaaagatagttactgtcttagataaaaactgaaacatacataataatataaaatttgctatattaataactctaattattttggaaggagggaaaatatgataagtgggagaatgttactcatcatgaattttctaaaaggaaaaaataagacaagttacaaggatattagcaaacaacttagtatagaagaaagaaaagttagatatgatataaataatttaaatattgttttgcgttcattaaacaagtcagtaatacaaaagatgaacaaaggtgtgttaattattcctgatgacttccaagtagtatgtataaataataacgaatatgtattttccttaactgagcgagtatctattatgaaaattatatcaatgtttaaaatagataatctaaacttagaaaaattgagtaaagaatttcaggtttctagaagttcaattaaaaatgaccttaatgttttgtcaagtgaattagaaagaaaccaaataactattacttatgataaatcttttaaaataagtggagaagaagaccttatatataagcaaagattgaacatattaaaatcgtattcttatctttttggtaaggaaaaatctgatttaagtgtatttgagaagtatttagtgaatgtaattgaaaaaatattcaaagggatttatttgattgatatatataattggtctatgaatttattattgcaaatgggatggactttaaatgatgaatcttttacatggtatgtgtcaaacattttcctttttacatggtatatacattcagatgaaaaacatcctttagaatctgcttcattaagtgagccatgttttgaaaataagtttgaccaagaatttgaaacaattattcaaaaaaagttgactaaggaacaaatttttctgttaaagagttttgtattttttacaaataaatatgcaagtttaaacgaggatatggatttgattagtacagaaattatagttcaagacctaatttacaatatgtcagaaatattagagattagctttaaagaagatatgattctttataaaggattactcaatcatattgccccattgatagagagaatcaagcagaatatacagatttatgaggaattacttcatgtaataccagataaatatcaatatgtacttgaagctactaaggtttctattcaaaaaaacagagttttaagtcaaataaagaatgaaaatgaaataatacttttggcaatacatttcttaggaagtatacatagaaatgagaggaataactacaaaaatatattgttagtttgtggatttggatatggtgtaattgctatgttaaaggatagtttagtaaatgattaccagataaatatagtagagagtattccatcatataagttacaagattataaagaatgggaaagtattgacttcattataacaacatcaaagatagtaatagacttgcctaaaacaattattgagataaatccatttttacaagaagaggattatttgaagtttgaagaaaaagggataaaaagaaagaacgtcttaactaattatatgtcaataaaaaaaaggttggactttttagaagaagatgctcaaaaaagagtattaagtattatatgtcaagaacttggatacagtgatgagagaatattatttagacaacttaatttaagtgatttaatagggattgataccataaggataattgatgaagatatgaaatgggaagatgctgtaaaaattagttcaaacatacttgctaattgtgattttgtatcagcacaatatgctgagaatattatagatattttaaaaaatgtgggtttttatgctgtaaaagataacgaatttgctttactacatggcaatgatagttcattagtcaaagtaagttcgataagtttattaatatgtaaagaagcagttagttttggagataaaaaggttaaaatcatattttgtctagcaagcagagataaaaaagagcaaattcctgcaataattaatctaactaaaatggtttataagactaattttattgctatgttagaaagtgcaaagacaaaagaagaagcagaagttttaattcataaatatgagaaggaggtcactgtatgaataaattagttaatgtaaaatgttcatttaaaatacatgctaattcaaaagaagaagctattgtatcgttagttgatgtagtatcaaaagaaggatatctaatagataaaaatcaatttttggaagatgttttaaagagagaagaaacattgtcaacttatattggacatggtataggtcttcctcatagtcaaagtgtaggtgttaaaaactcttgtattacaataggaaagcttgatattcctattgaatggacagaagaaggagaaaaagtggatttaatatttttaatatcagtaacaaaagacaatgaaaataatcttcatttaaagattttatcaaaattagcacgtttattgatgcatgaaagttttagaaatcaaattagatgttcagatgaacaaactgtttataatcttataaaagaaaaaatagaggaggaagattaaaatgagaattttaaagtttttgcaaaaacatcttatgacagcaacatcttatatgattccatttgtggttgcaggaggaatattatttgctttatcagtaactctaagtggacaagctgctgttcctgaaacaggctggttggctaaactgaatcaaattggagctgctggcttggctttattcattcctatattaggtggatatatagcatttagtatggcagataaaccaggattagctccaggtatgataggtgcatatttagcaaaagaagtaaatgcaggttttataggtggtatcatagcaggatttatagcaggatttgttgttttacaattaaagaaaattaaattagctcctacaatgagaactttaggttctatatttatttatcctttgattggtacattgattacaggtggtataattgtatttttaattggagaacctatagcttcttttatgacatggatgacaaactggttaaatggaatgtctggtgtttctaaaattcctttaggtggaatcttaggaggaatgatagcctcagatatgggtggtcctataaataaggttgctgctacttttgcccaaactcaagttgacacacttccatatttaatgggtggagttggcgttgcaatttgtatacctccaattggtttaggattagctacattattgtttccaaaaaaatttagcaaggaagaaagagattcaggtaaagcttcgctattaatgggatgtgttggaattacagaaggagctattccatttgcaacatcagatccagttagagtaataccttgtattatggctgggtcgattataggaaatattatggcttttttattaggatgtttaaatcatgcaccctggggaggtctgatagtattacctgtagttgacaataggttggggtatattgcatcagtattaactggagcagtagttgttgcagtattaatgaaattagtaaaaaaagacgtgaaagaagatgaagaaattgaagaggatttagatgaatcaattgaattaatatttgaagaattataaatataaatggaaggaatttgtataaaaaagtaaatataaaactataaacttaaaggagataagaatatgaaaattgtagcagtaacatcttgtcctagtggagtagcacatacttacatgtcggctgaatcacttgaattatcggccaaaaaatttggtatagaaataaaggttgaaactcaaggaagctctggaatagataatgaattgtcacttaaagatattgatgaagcaacttgtgtaatattgactaatgatgttgagattagaaatatggaacgttttaagggaaagaaggtagtaagaatgagtgtatctgagataattaagaaatctgatgcattaattaagaaaataaaagatacttttcaataaaaattgatttattttacatataactcaaagatgtttttaaagaaatttttattaaaagcatctttgaaaatatcttaaaaatagaataaaaggagatatagtcatgaaaaaattaccaataaagactgtcgtacaaagattactagacttacaagaagaggggaaaagtgcaactcttttaggaattggtcctatgtcaccaaacttgttacaagcaagttttgaactagcaaaagatgatgattttcctttaatgtttatcgcaagtagaaatcaagtagatgcagatgaactaggtggcggttatgtaaatggttggaatcaggaaacttttacaaaagatattaagaagattgccgacaaagttggatttgatggtttatattatttatgtagagaccatggtgggccatggcaaagagataaagagagaaatgaccatttgtctgttgatgaagcaatggagttaggaaaaaaatcttatttagcggacattgaagcaggttttgacctattgatgattgaccctacaaaagacccatttgaaattggaaaagtaattccactagatgtagtactagaaagaactgtagaattaattgagtattgtgaaaacgagagaaaaagacttaatctaccagacataggttatgaggttggtacagaggaaaccaatggaggtcttacttcaactgagacgtatgaaacatttataactagactaaaggttgaacttgataataggggtttgccaatgccaacatttatagttggtcaaactggtactttaactagaaagacagaacaagtaggaacttttaattttagaaatgcttatgatttagctcaaatggctaagaaatatggagttggtttaaaagagcataatggcgattacttagatgatgtaactttattagaacatataccatctcaaattattgctacaaatgtagctcctcaatatggtactgaagaaactagggcatatttaaaattagcagaagttgagtgtaaattagaaaaagagggcctagttgataaaacttctaatatcagacatgttcttcttgttaatgcaattgaatgtggacgttggagaaaatgggtagtaggagaacaaaaaaatctaactactgaagagatatttaagaatgaagttttatctaatgaaatactagatattgcaggacattatacatttaataatgatgatgttaaaaaagaaatagaagtgctttatgataatttaagtaagaataatattgatggtcaaagatttgttgtagaccatattaaacgtcctttgcgtgattatgcagaatgctataacttaaaaggtgttactacgaggattttaaataaataataggacttatagtggtgagtattgttatactaggtatttatagttataattatacttaccactattaaatttaggaggactaatattttgattaatttaatttttgatgtagatgatactttatataaccaattaacgcctttttacactgcatataataaagtgttttcttcaataaaggatatttctattgaagatttatatatgagtagtagaaagtatagtgatgaggtatttcatatgactgaaaatggagaaatgccaatcaaagaaatgcatatttataggataatgaaagcttttgaggagttgggaaattctattacagaaaaagatgcacaaagttttcaagatgagtatatatatcagcaatcacaaattacactaataccagaagttgagaggattttaaatttttctaaagaaagaaatattaatctaggaattataactaatggcccatcaaaccatcaaagaatgaagttaaagcagttaaatattgaaaattgggttgataaaagtaatatttttatttctagtgaggttggattttctaagccagatactaatatttttagagtagctgagaatgttatgaatttagatagagaaaatacatattatgtgggtgattcttatagaaatgatgtattaggtgctaaaaaagctggttggaagagtatatggttgaaccatagaggacatgaggtagaagagttgttttataaacctgattttgtaattttggaacataaggatttgatatctttatttataaaaatatgtagttataaaaatatgtagtaaaaaaatgttaataatagaattgtataaaataattaataataactatataaaattatatgtttagattgtgagcaatctattttatgttaaaaatagattatttagaagaaggggaaatcttaaaaaaatttgaatatcccctttttattatttaattaaaatgaaatagttagaaatatattttatttagtttagtcaataacattttgggattctttataactacatgttaactgttgaataggcttatcatatggtttaacccatcctttattaatacttaattctgtaagtgctgtgtgaccttctaccatttgagttagtgaagctgaatatatagctcttaattcaggtgtactacttgttaatgcagaattaagatacatattggcagatgctttagcagatgaaagcatacttaacattattactttatcgtctatataagtattgttcttaattagattttctatcatatttctcatgttatctatacctcctcagaaattagtatttcattttcaactataaattgttgtatagctttaattcttccttctgttgctaatatactagattctgattgtctttttaggtcttcatctgatattaacatatttattgctctttgcataagtaatccgtcagactccatttttataactgctgctaaagatattttttcagtttctgaaagtgttctcatttaatcatctcctatattgtaatttatgctttaatagtatgtctttcttttcaaggaaataaccattacacttttttacagtattttatattctctttatatcaaagtttagtcaacttaatatattaatataattttgtaggatatttatcattaaatatctataaaataaattatttgaatattcataaatcaaaatttatttgtatgtacttcttcaagagtcaatatgaattttttcaaaaaattaattttgatgataatcattaagggctatatttttcctaaagttgtgattatcattattaatttactaaaatactttaatgaaaaatagctaactttaattgtaggatattcttaatatatttgaaataaataaaaatattgaaggatataatattcaattggtatataaataataaatgatagttaagatttaccttagaggctaattaggtgttcagtcaaaattaatgcctttagaatacaaatgtattctaaaggcatttttactatgtattttcatttatattactaaacattatctatttttatatacatttctatgtattttattttcatcaaatcggtctataaattcatttttttcttcactatatccaatagatataagtgcataaggaactaattttactggtaagtctaaaatttgtttaactttatttactactttatttttaggaaatactcctgcccaacaagcagctagaccttgattagtaacttctaataataaattttgtgtgcaagcacctaaatcttgtatccatttaccaggttttaagaatttatctctatttccaagcactactatacataatggtgcaaattctatatgctttgctctatgctgtgactttgagagctctttcagcagttccttatcatctactataataaattcccaaggttgagcattttttgatgaaggtgcttgcatagctgattttagtatttcagttattttatcttcttctatatttttatctatatatgttcttattgaacgtctattttttataacttctaacatacagattctcctttaaataaaattatttctatttatataatatcattactttaagttttagctattacttatataaagaataaactttgtgttggttttatctaagtaaaagtaacattcagaactaaaaaacaagactataaatccaagatattaattaaaaaagaagtaataaaaaataatatacaagatttaaaaaagagtattgagcttaaaatttaattagaaaaccaattttgagataatctgttttttattttaacaaaaaaacataaataaagttcgatacgtagcgaatgaaaaaaatacaagaaatattttttttaaaaaatttcaaaaaagagttgataatatatgtatattaatataaaatttaaggtgtataattcgtataataatacgaatgatttgtagtgtaaaataacttataaacggagaggggaagtctaatgaaagtagcagtagttatgggttcaaaatcagattatccaaaattagaagaagggataaaactgcttgaaaaatatggaatagaggttgtagcaagagcattatcagctcatagaacaccagaacaactttcaatattcctaaaagaaatagaagatgatactgatgtaataatagcagcagcaggaaaagcagcacacttaccaggtgtaatagcttcacaaacattaattcctgtaataggattacctattaaatcatcaactatggatggactagactcacttttatcaatagttcaaatgccaaaaggaatcccagttgcaacagttacaatagacttaggtttaaacgcagctttattggcattacaaataatgactttaaaatacccaaaattaaaagaggatttgaaatcatatagagaagagatggcacaaaaggtgttagaagacgacaagaatttaagggggtagcagaaatgttattatatgaaggaaaagcaaaacaagtatattctacagataatgaaaatgaatatgttgtttattataaagatgatgcaacagcatttaatggagaaaaaaaagcagaaatatcttcaaaaggtatactaaataataagatatcaacaataatctttgaaatgttaaaagaaaataatataaatactcactttataaaaagtttatcagatagagaaatgttagttaaaaaagtagagattttaccattagaagtaatagtaagaaatattgctgctggttctatctgtaaaagagttggtcttgaagaaggtgtagttttcgatgagccaatttttgaaataagttacaaaaatgatgcttatggtgacccaatgctaaatgatgattatgcagtggcaatgaagttagcaactagagaagagttaaaattcttaagagaagaaactttaaaaataaacgagttactaaaagcatttttcttaaaattaaacctaaagttagttgactttaaaatagaatttggtaaggattctgaaggaaatataatattggcagatgaagtatcaccagacacttgtagactttgggatgtaaatacaaatgaaaagttagataaggacagatttagaaaagaccttggagaccttgtagaaggttatacggaagtactttcaagaatgaataataaataggaggcaaatgtatgtgtggagttttagggatttactctaataaagatgtaactaaagaactatattattctttatattctatgcaacacagggggcaagaaagctgtggtttagctcttttagatgatggagaaattaagtacaaaaaagatatgggattagttggagatgtttttaaggaaaatgaattatctaagttaaaaggaaatatagggattggacatgttagatattcaacagctggaggaagtcatgtttctaactgtcaacctttagttggaagttgtagaaaaagacaattagccatagctcataatggaaatctagttaatgcaaattatttaaaagatatgctagaagaagatggatatatgttccaaactaattcagatacagaagtgattttatatatacttgctagatattacaaaggggatatagtagaaagtttaaaagtgacaatggattatataaaaggtgcatatgctcttgtaataatgagtcaagaagaattggttgcagttagagacccacatggattcagacctcttgtacttggtaaaaagggtgatgaatatatatttgcatcagaaaattgtgcaatagatatacttggcggagaagttataagagatgtagagccaggagagataatagtagtcaaagatggagaactaaaatcatatttttattcagaaaattataaaccagttaagaaaagttgtatatttgaacacatatactttgcaagaaatgatgcaactatagacaatgtaaatgcatatgaatttagaattaaatgtggtgagagattagctcagaatgaaactgtaaaggcagatatggtagttccagttccagattcaggttggccaggagctattggttatgcaaatgctagtggattaaaaataagtgaaggcttagttaaaaatagatatgtaggaagaacatttataaaacctacacaagaagaaagagaaatagcagtaaaaataaaattaaatcctctttcaacaataataaaaggaaaatctataattttagtagacgactcaattgtaagaggaactacatctaaacaattagtaaaatctttaagagaagcaggagcaaaagaaattcatcttagaataacttctcctccagtagcttactcttgttactatggaatagatactccaaatcgctctaaattaattgcatcaagtaacaacgtagaagaaatgagagaatatattggatgtgatagtttaaaattcctagatatagaaggaatgttagatgcaacagaacataagtctactttctgtaaagcttgttttgatggagaatacccagttaagaaaattgataaggaggaactactttcatgttaacatataaagaatcaggtgtagatatagatgaaggaaatagagcagtagaccttataaaaggtaaaataaaaggaacttatgatggaaatgtagttggagatttaggtaacttcagtggattatacagtttaaaagattttgtaggtatgaaagaaccagttttgcttgcatctacagatggtgttgggactaagttaaaaatagctcagatgatggacaagcatgatactgttggaatagatttagttgcaatgtgcgtgaatgatttaatttgtcaaggagcaaaaccattatttttccttgactatatagctcttgggaaattagtgcctgagcatatcgaaaaaatagttggtggaattgcagatggttgtaaaatgtctggttgtgcactaattggtggagaaactgctgaaatgcctggaatgtatggagaagatgactatgatttagcaggattttctgtaggaatagcagacaaagaaaagattgtttctggaaacaatgttaaatcaggagatgtattggttggtatatcttcaagtggagtacacagcaatggattttcttttataagaaagatatttttagaaacttacaattataaaatggaacaatatgttgaagaactaggaatgacagttggagaagcacttttaacaccaactaaaatatatgttaaattagctttagatgtattagctaaacatgacataaaagctatagctcacataactggtggagggcttatagaaaatataacaagagttatacctaaagggttaggactagatatcaataaaaaatcttgggagaagcctcctatatttaaaatgatagaaggttttaatgctgttgatgagagagaacttcataagagttttaacatgggtattgggctagttttaatagtagataaagaaaatgctgatgatgttgtaaactttataaataatagagaaaatgacaatgctgcttatgtagataaaaaatacagtgaattattagaagataaagcgtatataattggtgaagtagtagatagtcatgaaggtgtagaattatgctaaatataggagttttaatatctggtggaggaacaaatttacaagcagttatagatggcactgagtctggagaaataaaaggtcaggttaaagtagttatctcaagtaagcaaggtgcttatgggctagagagagctaaaaatcataacataaaagcaatttgtgaaactgatgaagacaagataatagagattcttaaggaaaataaaatagatttagtagttttggctggttatttaaaaataatcagcccaaagctggttaatgagtttagaaacaaaatgataaacatacatccatcattaattccttcattttgtggagctgggttctatggagaaaaagttcatcaaggtgttatagattacggagctaaagtaactggtgctacagttcattttgttgatgaaggtgctgatactggaccaatcataatgcaagatgtagttaaggtaaatcaagatgatgatgcaaagacacttgcaaaaagagtgttagaagttgaacataggattttaaaagaaagtataagtcttttttgtgaaaataaattaaaacttcaaggtaggagagtgtttataaatgagtaagagagctttaataagtgtaactgacaagactggtgtagtggaatttgctaaggagttaaataagttagattatgaaattatatctacaggaaatacatttaaaacattaaaagaaaatggtgttaatgtaatgcaagttgaagatgttacaaattttccagaaatattagatgggagagtaaaaacattaaatccatatatacatggtggtatactttataaaagagataaagaatctcatgtagaaactgtgaatgagcataaaatacattcaatagatttagtagctgtaaatctatatgattttgaaggaactttaaaagctggaaaaagtcatgatgaaataattgaaaatatagatattggtggaccatctatgatacgttctgctgccaaaaactataaagatgtaatagtagtagtagatataaaagattatgattctataatagaaaaattaaaaacagatacaatgacattagaagacagaaaaaaattatcatataaagctttctcaactacaggaagatatgatgcgttaatatctagttattttgctggagaagttggagatacatatcctgacatattaaatttaactttccaaaaagaacaaactttaagatatggagaaaatccacatcaaaatggtttcttatattcacaatcaaatgcaaaaaatccaatcttaaattatgagcaattaggcggtaaagaactttcttttaacaatttaaatgatttacatggatgtttagaagtaatgagagaatttaaagatagtgaagaagtagtttcagtagctataaaacatgctaattcatgtggggtaggtctaggaaaagatgcttttgaagcatatacaaaatgttatgaagcggataaggtttcaatatttggaggaatagtaggaataacttctactatagataaagctacagcagagaaattaaatgaaatattcttagagatagtagtagcatatgattttgagccagaagctttagaggtacttaaacaaaagaaaaatttaagaatattaaaattagctaagatagaagatagtttacaaccatatgaaatgaaatatttagatggaaaattattaatacaagatagaaataatatattagcagaaaaaagtgaaaatgtaacaaaagcaaaaccaacagatgcacaacttaaggacatggaatttggtatgagagtagtaaaaaatatgaaatcaaatgcaattgcgatagtaaaaaatggtcaaactttagctttaggttgtggacaaacatcaagaatttgggcattaaaaaatgctcttgaaaataacaaagataaagattttacaggagctgttttagcgtcagatgcatttttcccatttgatgattgtgtaacattagctcatgaatatggaatatcagcagtagttcaaccaggtggctctataaaggataaagattcaatagaagcttgtgataagtatgatatggttatggtatttacaggaataagacacttcaaacactaaggaggatattatgaagatattggttgtaggcggtggcggaagagagcatgctatatgctggaaactaagcaaagaaaaaaatgtagaaaaagtttattgcgcgccaggtaatgcaggaattacaaatgtagcagaatgtgtaaatataggtgatactaatatagaagaacttttaaaatttgccaaagaaaatgaaataggtctgacaatagtaggaccagaagtaccactagttatgggaatagtagatgagtttgaaaaagaaggattaagagtatttggacctaataaaaaatgtgctcaacttgaaggaagtaaagctttttcaaaagaatttatgataaaacataacatacctactgcaaaatataaagaatatacaaacttagaagaagctatatcagaaatagatagttttggatatccagtagtaataaaagcggacggattagctgctggaaaaggtgttgtaatacctgaaaatagagaagatgctatagcaactttaaaagaaatgatgtcagataagaagtttggagctgctggagataaaatagtaattgaagagtttttaaaaggaatagaaacttcaattctagcatttgtagacaatgatacaatagttcctatggcaagtgcaaaagaccataaaaaagtaaacaactatgagcaaggtccaaacactgggggaatgggaactttttcacctagtgaaatatatacagaagaattagcaaataaagtaaaagagacagtattagaaaaaactttagaaggcttcaaaaaagatggacttaattttaaaggtattttatttgttggtcttatgataactgaagatggagaaaaagtacttgaatataatgtaagatttggagaccctgagacacaatctgttttatttagattagaaacagatttacatgagataatggaaactatactagataataagttaaaagatatagaaataaactatagtgatgatgaagctgtatgtgttatgcttacatcaggagggtatccagacagttatgaaaaagggaaaattataactggtcttgaaaacttggatgatgatatagtagtattccatagtggcactaagatgcttgatggtaatttagttaccaatggaggaagagtaattggtataactgcaaagtcaactacagttaaggatgcagcagaaaaagtttatgaaaacataaagaagataaactttgaaggaatgcactatagaacagacataggaagataatttttctaaaatggaggataaggtatgttgaatactgaaaataaagactcaatggttagaagagtattagttgaaaaaagagaaggttttgaccttgaggctaaagctttaaaaaaagacttagtagaaagtttacacatagataatatagaaaatttaagaatattaaatagatatgatgtagaaggaatatcagaagaagtttatgaaaatgcagcaaagacaatattctctgaaccaaatttagatgtagtatattatgaagaaataccaaaattaaatgatgaaagagtatttgcaatagaatttcttcctggtcaatacgaccaaagaggtgattgggcagctcaatgtgtacaaattgtaaatcaagggataagacctgctattaatacagcaaaagtttatatattatcaggcaaaataactgatgaagagttttctaaaataaaagattactgtataaatccagtagatagtagagaagcatctttagaaaaaccagaaacattaaaaatggaaactgaaataccaacaacagttgaagtattagatggatttatagatttagatgaaaatggattaagaacatttgtaagtgaaaaaggattagcaatgactttaggagacttacaacacgttcaaaaatactttaaagatacagaaaagagaaatccaactataacagaaataaaagtattagatacttattggtctgatcattgtagacatactacttttatgactgaaatagaaaatgtaaagatagaagatggtaagtttaatgatatagtaaaagaagcgtatcaaatgtatcttaactcaagagacaatgtatatgtgaacagacataaagatatatgtttaatggatatagccactgttgcagtaaaagaattaaagaagaatgggaaattaaatgacctagatgaaagtgaagaaataaatgcatgtagtataaacgtagatgttgaagttgatggtaagatggaaaaatatctagtaatgtttaaaaatgaaactcacaaccatccaactgaaatagaaccatttggtggagcagctacttgtttaggtggagctataagagacccattatcaggaagaagttatgtttatcaagcaatgcgtgttacaggaagtgctgacccaagaacgactttagaagatactttacctggaaaacttatgcaaagaaaaataactacagaagctgctcatggatatagttcatatggtaaccaaataggtcttacaactggacaagttgcagaagtatatgatgaaaactttgttgcaaagagaatggaaataggtgcagttatagcagcagtaccaaaagagaatgtagtaagagaaagacctgaagcaggagatgtaatagttcttcttggaggaaaaacaggaagagatggttgtggaggggcaactggttcatctaaagaacatagtgaagagtcaatcttaacttgtagtgcagaagttcaaaaaggagatgctcctaacgaaagaaaaatacaaagattctttagaaataaagaagttgctcaaatgataaaaagatgtaatgattttggagcaggtggagtttgtgttgctataggagagattgctgatagtttagatataaacttagacttagtacctaaaaaatacgatggacttgatggaactgagcttgcaatttcagagtcacaagagcgtatggcagtagctataaaaaaagaaaataaagataaatttatacaattagcagtagaagaaaacttagaagctacacatgtagctacagtaacagatacaggatatttaagaatgttctggaatggaaaagcaattgtagatataaatagagagttcttagatacaaacggagtaaaacaaactactgatgtccatgttactaaagtagatgaagaaaatacattctttagctctaatgaaatagtaaaagatgttaagtgtgcaagtatgaaagacaagtttacaaaagtattatctgaccttaatgtttgttctcaaaaaggattagtagagatgtttgataatacaattggtggtaatacagtacttatgccatttggaggaaagtatcaagcgactccaacacaaggtatggttgctaagataccagtacttggaggagaaactaatacttctacaataatgacttatggatataatccaaaggtaggaaaatggagtccattccatggtgccttgtacgcagtagtagaatctgtgtgtaaattggttgctattggaggaaattatagtacaacaagacttacattccaagagtattttgaaaaacttggtaacaatccagaaaaatggggtaaaccattctcagcacttttaggagcattttatgcacaaagtaaatttgagatacctgctataggtggaaaagacagtatgtctggtacatttaaagatatcgaagttccaccaacattagtttcatttgctgttgatacagtagatgcgaagaaagtagtatctccagaatttaaaaaagcagactcaaaagtagtaatgttatgtgtaaacaaggcagaaaatgatgttgtagattttgaggaattaaagagaaacttagacaaagtaagagaacttatacatggaaataaagttttatcaacatatgcattaggatttgcaggtgtaggtgaagcaataagtaaaatggcttttggtaataaaataggatttaagtttagtgaagaagctgaaaaaacatttacagatgataaattatttgaggctagttatggaaatatagtacttgaattagcaaatgatgatttatgtatgttagaaggatacaattatgttgtgcttggaagtacaactaaagaagctagtatatttatcaaaggtgaagaacttgcattagatgaattatataaagcacactgtagtactttagagcctatattcccaactaaaacagaagaagtaaaatcaaagatagagactataagttatatatcacaaggagaagctaaaaaatcatcattaagtatagctactccaagagtatttataccagcatttcctggaacaaactgtgaatatgactctgcaagagcatttgaaagagtaggagctaatgcaaacataagagtattcaagaatttaacttataaagacatagaagattctatagatacaatagtaaacgaaataaaatcttctcaaataataatgttaccaggtggatttagtgctggtgatgagccagatggttctggtaaatttatagctactgtatttagaaatcctagagtgcaagaagctataaatgaatttttaactcaaaaagatggactaatgttaggtatctgtaatggattccaagtattaattaaattaggattagttccatatggagaaataagagttccaagtgaaagtgctccaacacttacttacaataatattggtcgtcatcaagctaagattgctagaactagaatttcatctaataaatctccttggttagctcaaactaatgttggagatattcataatatagcaatttctcatggagaaggtaaatttgttgctagtgaagatgttatgagagaattaattgctaatggacaagtagcaactcaatatgttgactttaataatgaagctacttatgatattgagtttaatccaaatggttcattctatgctgttgaaggtataactagtgctgatggtagagtgtttggtaaaatgggacattctgagagaattggtgaggaagtatttaagaatattataggtgaaaaagaccaaaagatatttgaatctggagttaaatattttagataaagctttgatgtttaattgatagctagaatatataatttagatatttagatttaaagagatgtaataatatgatgataatcatttaatattacatctcttttttatttatctaagaaataataagttcaacctaagttaaaatacaagctgtgttataattaattactaagtaaaattaaatatttattggagggcaacataattaatgaaaatattaataacagggtctaatggtcaattaggaaaagaattggttagccaattagaagcaatcaatcaaagtataaatcaaccaaaatacgttatattagctacaacaagaaatgatttggatatatccaatcagactaatatagataattttattttgcataataaacctgatgtaattgtaaactgtgcagcatatacaaaggttgatgcatgtgaagataatatcgaaattgcgtataaaataaatgccttaggagtgagaaatttagcaatagcatcagaaaaagttaatgctaagcttgttcacatatcaactgactatgtattcaatggtttttctaaatatccatatagggaagacaataaaactgaacccaattctgtgtatggaaaaagtaaacttatgggagaaaagtttgttgaacaattctcacataagtactttatattgagaacagcatggttatatggtaatgggaataattttgtaaagactatgataaaactttctttagaaaataaagaggttaatgtggttaatgaccagtttggaaccccaacaagtacagtagacttagcaaaaattataataagaatcatggaaacagaacattatggagtttatcatgctacatgtgaaggtgagtgtagttggtatgattttgccaaaaagatatttgaattaaaaaatatagatataaaagtaaatccaattaagagtaacgaatttaaatgtaaggctcaaagaccactatattctgtattggataattttatgttgaagttaattggtttaaattcttttagaaagtgggaagaatccattgaagaatatttagaaagatatgatataaatgaaaagtaaatgtattatttttagaaaagaaaataagatattataaaaaatataaatatttcttttatttatccgataatcataatatgacaaaaacaaatttaaggatggaaaaagatgaaaggaattattttagcaggagggtctggtacaagactatatcctataacaaaatgtatatcaaaacaaacacttccaatatacgataaaccaatgatatattaccctatgtcggttcttatgttggcagggatacaagatatattaataatatctacaccaagagatataaaagcatttgaagaattatttggagatggaagttcactagggcttaaaataacatatgcaattcaggagaaagcaaatggaattgcagaagcgtttataataggagaagaatttataggaaatgacagagtgtctcttgtattgggggataatatattttatggatatggatttagtgaaaggttggagaatgcagttaaaagaaaaggagcaactatatttgggtatcatgtaagtaatccaaattcgtttggagttgtagaatttgataaggattttaatgtattatcaatagaagaaaaacctacagttcctaaatctaattatgctataccaggattatatttttatgataatgatgttgtagagatagcaaagctagttgaaccatcagatagaggtgaattagaaataacctctataaacagtgaatatctaaaacgaggaaaactaaaagtggaacttctaggaagaggtatggcttggcttgatactggtacacataaaggtctattggatgcttctaactatgttgaagtggttcaaacaagacagggactgtatatagcatgtttagaagagattgcatatacaaaaggatatataagtagagaacaattaatgaaactagccaagccactgataaaaactgaatatggtcaatatctattaaaattggctagtgaagatatgcaatatggtagataaaatttattataaattttattaagggagtttgttataatgggaaaaatcaatgttataaagactaaaatagaaggattatatatagtcgaaccaaatgtattttgtgatgaaagaggatattttatggaaagctataataaaaaggattttatagagcagggtcttgatatgtgttttattcaagataatgagtctagctcaagaaaaggtgttttaagaggaatgcattttcaggttagatatcctcaaggaaaattagtcagagttacagagggagaagttttcgatgttgcagttgatttaagaaaagattcacagacatttgggaaatgggaaggtgtaatattgtctgataagaataaaaaacaattttatattccagaagggtttgcacatggatttttagttttatcagaaaaagcagtatttaattacaaatgtacaaactattattatccagaatttgagcatgggtttatatggaatgacaagcaaatatctattgagtggcctttaaaaggaattgaagaaatatttttatcagaaaaggacaaaaaacaaaaaagttttaaagatatttgtataagacgttaataaaaatttattagaattaacatttaggagaaaaaatatgaaaaaaatactgataactggaggagcaggatttattgggagtaactttgtacattatatgcttaacaagtatgtagattattttattgttaacctagacttgttgacttatgctggtaatttagagacattaatagaaatacaagacagttccaattataaatttgttaaaggagatatttcaaatagggaacagatgtataagctatttgaagaagaaaggtttgatatagttgttaactttgccgctgaatctcatgtagataggtcagttgagaatcctgatttatttattaaaacaaacattataggaacacaagtacttttagatgcatctataaaatatggagttaaaaggtatcatcaaatatctacagacgaagtgtatggtgatttaccaattgatagaaaggatttattctttacagaacaatctcctatcaatccaagttctccatattcagcttctaaagcatcagcagatttgttggtaagttcttattatagaacatatggattgttaacaactatatctaggtgttccaacaattatgggccatatcattttcctgaaaaattgatacctcttatgattttaaatgctttggaaaacaaacaattgccagtatatgggaatggggaaaatgtaagagattggttacatgtatatgaccattgtactgctatagacttaataatacataaagggaatataggggagatttacaatataggaggtcataatgaaagaagtaatttagaagtagtaaaaatgatattaaatcttttagataaatctgaagagttaatatcctatgtaaatgatagacctggtcatgatttaagatatgctattgatgcaactaaaatagagaatgagttaggttggaaggcaaaatatgactttgatttgggtataaaagaaactgttaagtggtatatagaaaatgaatcttggtggaaagctgttttatcagtgtaactttgaaatttataaaatttagaaaggggcgttttatattgaatgagataagttcactaattaatatattagcattgactcaattatctggtagtaatactacaaatcaatgtaactgtacatataatagttcatctggatttgatatgattatgatgaccttgttaaaagcattatcacaaaataatcaacagacttctaatggctacaatttatcgtctaattctgagaatttatttgacgaactcggcagtgtagtaaataatacagctagtagatttatagatgttgatacaaaagataaaagtgtaaaatcaagaattgaaaatgctatagagcaagcatcaaaaaaatataatgtggattcgaatcttataaaagcaataattaaagttgaatcggattttaatccaaatactgtttcttctgctggtgctaagggtcttatgcaacttatgccagaaaattgcagagacttgggggttacagacccttttaatatagagcagaatatagatgctggaactagacatattaaggaatacattgatatgtttggagggagcatagaaatgggattgatggcatataatggtggtcctggaagaatgaaaagtagaggagtagaatcaatctctgacctgtataaaatgccaaaagaaacacaaaattatattcctaaggttatgaaatattatagagggtaggctttattatggggataaatatagataagctaaacataagtccaagtataaatatggaggttaaaaaactaaaagagagtaataaattttctgacaaattaaactctttaaaacaatcttcttcattggaagatataaaacgaaatttggaaagtgtaaaaaaggcaggagaaaggcttgtacttactcaaaactatggcgacattagtatatataaaaatgcagtaaaagaatacctaaaatctgttgtagataatatgtattcacttgataaaaatagtagcttttgggagcatcagtattataagaatgtaaagattgttgatagtaaacttgaggatatgactagtaagttaattagtgaagaaaaagaaaacatagatattgtttctactgttgatatgatacaaggcttgttgatagatatgtatagataaggttatacaaggagaaaagttttatgaatagtaaaaaagaggatatatatgaattgaattttgggcaattaatagaagaaaaatctggtgttatagaagaaaatcaaaatgtttttaatgcaaaagtaaatgtagctgtttctataggaaatacaacagaaacaataaaaaatatattagatttaaaagaaggctctataataaaactaagtaagaatgtggatgaaaaattagatatatatgcaaatgatagattgtttgcttatggagaaagcattattacaaatgagaagttatctgtaagattatctaaaatagaagattcagatgtaaattagtattttaaatagtatccctttaggctatgatgtatgagtttagctaaggggatatttttataaaaaatttaaaatatgcgtgaattatataaatgtttttattttatgagcgataattaaattataagtatgtaattttggaggtgaaactatggatattaaaaatgtaagttcaaatattgtagtgaataattatttaaagaatacatctggtgtaaaaaaagtggaagaagttaaaaaaattaataaaacagacaagatagagctatctaaatttgcaaaggaaatggcaagtgtgtcaaatatgagtgatgagaatattaggaataaaaaagtcgatgaaataaaaaatgcattagaaaatggaacttacaaaataaaaccaaaagaaattgcgaaaaaaatgatagaggatatgcgaggataaagtcatgattacagacttaaaagttataatatatgaagaaaaaaatataattagtaagatgatggaattattaaaagaacaatttgattatatagttgaaaaagacttagaaaatttaaatatgttaaatcctaaactagaagatattagcagggagcttgcatccatagaaataaagagaagacaactttttggtgatgatatttcaatgagtgaagttgttgaaaatagtaatgatagatatttaaaagaaatatatacagacttgaaacacattcttgctttagctaaaaatcaacaagaatcaaatgattctctaataaagaaagaacttatttttacgaaaaaaatgattaatttcataaaaccagctgataagcaaactgcaacttataattcttatggaaatattagaaaataaatattaggaggagaaatatggcaggattattttccattttaaatacagctaattcaggaatgaatgcgcaccaaaaagcaatacagacaatttctcataatataagtaatctagatacagacggttattctaggcaaaggactgagtttgctacaaatagtccaatgtatatgcctagtttgagtaattcaattgcaagaggacaattagggactggagtacacgtaacggatgtaacaagagctagaaatagtttttatgattaccaatttagagcagaagctcataagtatggtaatacagtttcaaagtatgactattataatactatagaaactataataaatgaaccatcagactatggaatatctgcaggtatagacgacttttttaaaggatgggaatcattagcaaaggatataaatagtgatagtaaaaaaagtctagtggtagaaaatgcatcaaatctagcaactttaataagtgaaagttataagaagcttaataagttaaagggagatatagacgataatataaactctgaaataaaacagataaatgacatgttaaaaagtcttgaagatttgaataaatctattgatgttatatctggttctggctctactccaaatgatttacttgatgaaagagatagaatattagatgacttaagctttaaattagaccttgaaaatagcgatgttaaaaatatgctttcagatggtaaattagaacttaatgaattaaaaaatgcagatggaacttggaaaacaggtgtatcaggaaccttacaaggcttgtttgaaatgcatggtaagattgatacatataaaagcgatttaaaagatgtatctgatgggttagctaagcagataaatgatgtttataatacatctgctggaataacagtaacagatttttttataacttcaaatgtagatggtgaagatatcataaaggtaaatccagctataaagagtaacccaaatgaattaaaacttactgctgatgaggcttcaaagattgctaagttaaaggatgaaaaaatagatattggggtggctggtggaaaagtaagtacaataagtgaccactataaagcctttgcagaatcagtaggtttagattctcaaaaagtgaatcaagatgaagtgaatcaacgtaaaattataaataatattgataactcacgaatgagtgtttcaggcgtatctttggatgaagaaatgacagagcttataaaaatacaacgctcctatcaagctagtgcaaaagttatgtcaacagctgtgcaactgttggatgttgtaataaatggaataatttaatagaagggggaatttataatgagagttagtacaggtatgatgtctagcaactatctaaactcactacaagataatctacaaagattagataaggttaatagacaagttaatacaacgaaagaaataaacaagctatcagataatccatataaggcaataaaaatattgaactcaaaaagtgaaataaaaactatggagacttatgttgagaattgtaaagatacagggaattggttagaaactactgatactgcattagatcagcttggaaaattattatcggacataaagaaaactttggtggcaagtggtgatggtgcatattcagatgatgagctaaagactcttagtaatgaaactaatgaaaagatgaaagaaattgcaaatgccttaaatgcaacacatgaaggaaagtacatattttcaggttcaaatacaggtgtaccacctgttgaatgtatagataatgctgacggttcagtgagcttaaagtttaattctagtttaaatcttaataaattaaatgactctttgagtatggatatagctcaaggaataagtgtagattataatgttaaattgagtagccttggatttgacccaacaaagactgacccatttgaagagttaaataatatatcaaagaaattagcaaatccagatgctgatgctataaaagagctgacaacaacttgtttaggcgacatggaacaattaatagaaaatacagtaaatgttaggtctatatatgggacaaaagcaaatacagtagaggctatgaaggaaaaaaatgatgatagtttgatacagttaaaggatattttgtcacaaaatgaagaaatagattatggagaaaaactcgttcaattaaaggcagcagagttaacttatcaagcttcactacaaacaggaggaaagttatttaatgtatctatattagattacatatagtaaaataacgcagatatgatgaaggttacattaaaaaaaggtatattaggttttgaaaatttaaaagaatatgagcttttagatatagaagataatgattctttaaaagaatttaattctactgaagaagaaggtataggatttgttgttgtatctccatttgagattatcaatgaatatgaaatagttttaaatcaggaaacaatagaaaaactagaagtgaaatctccaaaggatgttgtactatttaatataattactcttggtcagacatttgaagaatcaactgtgaacatgaaagctcctatagtgataaatataaaaactaattttggaatgcaaataattttacaggatgataaatattcaataaggcatccattattgagaggtgataatggatgctagtaatttcaagaaaaaaagatgaagcagtacttataggagaaagcatagaagtaaaaattgtaggggtagatggaaacaatgtgaaactagctatatcggcgcctaacaatataagtatattaagaaaagaaatatacgaaaaagtaaagagtgagaatataaaagctacaaataaaaatataaaaattttaaagtcattaaaataataagcttggaggaagtaatatatgtatggagaaaatccttataattcttataaacaaaatgctgtttttatggcatcaaaggaacaattgttacttatgcttgttgatggagcagtaaaatataccaaaatagccagagcagctatcttagataaaaatacacagaaagcgcatagagaacttgtaagagttcaggatatatttacagaactaatggttacattagaccaaaatgcaggacaatgggcaaaggatatgtacaaagtttatgattttgtaagatatgaactttcaagagccaatattagaaaagacatccaggtaatagataatgtgttgcctgtaatagaacaaattaaagacacatggcatgaagctgataaaaaaagtaaagaagaaagaagtaggtacaaataatggaattaaatttagctgaattagataagttatcaaaagaggaattactattgatgcttgtagatggcacagtaaaatataccaatatatccaaagaagctcttttaaataacgactatttgaaagcacataatgaacttataagagttcaaaatatatttacagaactaatgactacattagaccaagatgcaggtcaatgggcaaaggatatgtataaagtttatgaatttataaaatctgaattagcaatagctgatgaaaataaagatattaaaataattgatgatatattgccaatagtaaaacaaattagagatacatggcatgaagtttacaatcaactaaaaatataattagatggagggataaaggtatgtcaagtataagtcctataagagttacaggtctttcaggaaattttgatatggaaggcataatcgaagctagtatgattagagacaaggaaaaagttgataaagcaaaacaagaacaacaaatcgttaaatggaagcaagaaatatatagaaatgttatacaagaatcaaaagatctttatgataaatatctaagcgtaaattctcctaatagtatagtaagtgaaaaagcatactcttctacaagaataaccagttctgatgaaagtattatagtagcaaaaggctcagctggtgcagaaaaaataaattatcaatttgcagtttctcaaatggctgaaccagcaaaatttactattaaattaaattcaagtgaacctattgttcgacagttccctccaaatgccagtggagctagttctttaactataggagatgtaaatataccaatatctgaacaagatactacaagtactattgtaagtaagataaactccctttgcgcagataatgatataaaggcttcttatagtgagatgacaggtgaattgattatttcgagaaaacaaactggttcgtcatcagacattaatttaaaagtaattggaaatgacaatttagctcagcaaattgctaatgataatggtatcacatttgcaaatgatgctagtggaaacaaagtggcaagtgtatatggaaaaaatctagaagctgatgtaactgatgaacatggaagagtaactcatataagtaaagaacaaaattcatttaatatagataatattgactataatgtaaattcaaaaggaactgcaaagttgacttctgtcactgatactgaagaagctgttaaaaatatgcaagcatttgtggatgattataataaactgatggacaaggtctatggtttagttactactaaaaaaccaaaagattatccgcctcttacagatgcccaaaaagaagatatgacaactgaagaaatagaaaaatgggaaaagaaagctaaagaaggtatacttagaaatgatgatgagttaagaggttttgttgaagatattcagtctgcattttttggagatggaaaaaatattattgcattaagaaaactaggtatcaatgaaagcgaaaattacaataaaaaaggtcaaatatcatttaatgcagatactttttcaaaggctcttatagatgatagtgataaggtatacaaaacactagcaggttattcttcgaattatgatgataagggaatgtttgaaaagctaaaagatattgtatatgaatattctggaagttcaacttctaaacttcctaaaaaagcaggtatagaaaaaactgcttctgctagtgaaaatgtatattcaaaacaaattgcagagcaagaaagaaatataagcaggttagttgaaaaaatgaatgataaagagaaaagactttatgctaaatattcagccttagaatctttgttgaatcagtattcttcccaaatgaattatttctcacaagcacagggtaattaattatggataaattaaaagaaaaattaaatttatataaagatatatctttacaaattataaatttgattgaaaaggaagaatatataaagataagtagtaagttaggtgaaagacaagagattataaatagtgtaagtgaaattgatagaaatgattttatacagctttataatagaatggaattaattgaaattgatagtaggataagagatattttacaaggacaattattagaagtaaaaaaagaattacatgagtataagcttactaaacaagtgaacacaatgtattataacttaaatagagaaaaagtaaatatttttaataaaaaagtataaagttatgtaccatcttgtccgattatataaatgaagaattaataaaaaagattaaaagtagaaatgacaaggatgtcaactatactaaggagggtaaaataatgagagttaatacaaatgtaagtgctttgatagcaaataaccaaatgggaagaaacgtaaatgcacaaagtaagtctatggagaagttatcttctggtgttagaattaagagagctgctgatgatgctgctgggcttgctatatctgagaaaatgagagctcaaataaaaggtttagaccaagcaggaagaaacgttcaagatggtatatctgttgtacaaacagcagaaggtgcattagaagaaactggtaatatactacaaagaatgagaactttatcagtacaatcttcaaatgaaactaatactgctgaagaaagacaaaagatagctgatgagttgttacaattaaaggatgaagttgaaagaatatcaagctcaattgagtttaatggtaagaaattacttgatggaagttctacagaaataagattacaagttggagctaattttggaacaaatgttgcaggaacaactaacaacaacaatgaaataaaagttgctctagtaaatacttcaagtataatgagtaaagcaggtataacaagttctacaatagcaagcttaaatgcagatggaacttctggaacagatgcagctaaacaaatggtgtctagcttagatgtagctcttaaagaattaaatacatcaagagcaaaattaggggcacaacaaaatagactagaatcaactcaaaacaacttaaataatactatagaaaatgttacagcagctgaatcaagaataagagatacagatgttgcttcagaaatggttaacttatctaaaatgaatatattagttcaagcatcacagtcaatgcttgctcaagctaatcagcaaccacaaggagttttacaattattaggataaaataattttgtatattggatatagaagaaagggtaaggctttgctttactcctttctttttttacaaatatacttttgaaaggaaaatatatatgttacttagtatagttatgattgttaaaaatgaagaaaaaatacttgaaaaaactttaaaatcattaaccacattaagaagttctatagagagtgaacttataatagttgatacaggttctacagatgatactataaatatatctaggaaatacacggaaaatgtgtactttcataattggaataatgatttttctagtatgagaaatatatcaatatcctatgctaaaggtgaatggttacttatattagatgcagatgaaatactaattgattcttcaactattgtgaaattttttaaagatggtcttgataaaaaatttaattcggcctcaatacaattaaaaaatctttactcatatgataaaaaattatatggatattgctcagtgcttagactttttaaaaacatcgattttagataccatggtaaagtacatgaacaaccaatatacaaaaaccctatatttaataatgttgctgattttgaacattatggatatttgtttgaagatgaagaaataagattaaataaagtaaaaagaaatgaaaaactgttatttgaagaattaaaagagaatgataattctccatatacaaattatcaattagggaaaaattttattatattaggaaaatatcatgaggctttatactatcttgagaaatcttatgaattatattctaaactagaatcggcacctggttacttgataacaagtcttgtaaaaacatatttatatttaggaaagcataagaagtgtgaaaaattgtgtctaaagtatattaagaaagacatgaataatattgatatatattattatattgcacaagcacaagtagatttagggaagtatgaaaatagtatagattcgtataagagatatatttatttgttagataattatgaaataagtacacaagcaaatagtttattttcagacactgatactgtagggcttagggatgaagctattattacactgataaagatttattataaacttgaaaaatatgagtctgtaatttcagagtacaataacattgaggatatggaaaagaagaagaatgtgtactttagcttatttatgtccctatacaaattgaacagatttgaagatataaaaaactattataaagaagtttcaaattctaaaattgaaaaaaatagtttttataaaaatatagaagaagttataaataatattaaagatgatgaaaaagagcatgtatataaaatcctttgtgacattgaaggtaattatggcattttaaatcagataaggataaataaatgtgtatctatagataagtgtaaagaaatactcaatgaagaaaaagaaataatttatgcatatattataaaagtagcttttgaagataagattgatttactagatattttttatgaaatggaatatgtatggatagagaaatacctaaaatatcttttagcactagaaagaagttttaatttagtactatataagtacataattagtcgtccgaatacatcagatataaaaaagataagagtatataaagctatatctaaagtagttttagaaagtataagtttaagtgatgaaaaatataaggagattttttatctttatataatgtattcttataagtacataagatacatatatagaaatttaagcgattttgaattaataaaatttgtttgcaatgatttagataagtttactatagaatttaagcatctacttgacattaaaaataaagtaaatgatgctaatgaaaaattagagtatatacatagtatgaggaaattactaaatgagtatcctttttataataaaataataaaaatacttataagtgaattagaagaaaatataaaagaaagtgaagaatttaaggatttaaaagatagttttattattagtatagaaaatatgattgaaactggcaaaataaatgatgcgaaatcattggtagatgactattcaaaaacatttatggatgatgtaaaaattttaaatataaagggaattttatatatgtttgaaaataagcttgataaagctgattttatgttaaaaaaggcattatcattagatgtagaaaatgaagatactatatataatatagaatacttaaaaagtttaagataagtcaaaaatgggagaattgaagaatgaatacaccaatagtggttaatgaaaaatctaaagatataataaaagattggcaatatacgtatacaaacgaagatataaaatttacaagcataataatattgacatataatcaaatagaatatactaaattatgtattgaaagtattaggaagtttaccccaaagaataaatatgaaataataataattgacaataactcttctgatggaacagttgagtggttaaagggacaatctgacataaaatctgtatataataacaaaaacctaggatttccaaaaggatgcaatcaaggtattgagttggctactggtgaaaacatattgttgttaaataatgatgtaatagttactccaaattggctttataatttgaataaagctttatggtctcaagataatataggtgctgtaggtcctattacaaatgcatgttcgtactatcaacaaattgatgttgattataaatcaattgaggatatgtttatgtttgcacacaaaataaatacatctaatattaacctatggaaatatagattaaagttagttggattttgcatgttaataaaaaaatctgtgctggataatgtaggggttttagatgaattattcacacctggaaattttgaagatgatgatttatcttttaggatgctagagtcaggatataagctattattatgccaggatacttttatacaccattttggaagtgtatcttttaaagaaaatcgtaataaatatacagatataatgtatattaatagaagaaaatttgaaactaagtggggatttaatccagaatatagtggaatgataagaacagatttgatttctaaaatagatgatagtttggaggcaaatattaatgttttagaaataggctgtggtataggggctactcttttagaaataaaaaatatatataaaaatgcatcaatatatggaatagaaattagtgagtcagcaggtaaacttgcaaagtatagtgcagatgtacttatagcagatatagaaaaagtaaagttggattatgaaaaagatttttttgattatataatattgggagatgtacttgaacatttaactgacccatggaagatagtcaatgaactgaaacaatatctaaagaaggatggttgtttgatatctagtataccaaatattatgcatgtttctgttttaagaaaccttgtgttaggtaattttacatatgaagattcaggaattttagacaagactcatttaaggttttttacattaaatgagataacaaaaatgtttaatgatagtaattacataataaatagtgttacagctactagtatgccactttcggaaattgataatagattcattgatacaatgtgtaaggaaagctgtaaagaaatgagacaacagtacgaatcttatcaatatatagtaaaagccactaaaagcatagatactaaaagatattctagtattagtatggttaatttaaaatacgctttaatgagaattgataatgaattagatgtagatagtaatttaagttatatatttgataattataatataactgaaccatgttttgttgatgatattgaatatttagttgatacgtttgtgataaataaagcaactctattaaatagattaggagttgaggcatttaacagaggtttaggagattttagtataaacatgtttatgacagtattagagatggatagagatgatattgattcaatatataatataacaagtgtattatgtgaattagaagaatttgatactgcttacaacttaattaaaaatagtagcaaaaaagtacagagtgaaagtgacatacaagatatactttattttattgaggggaagagatatgaataatgataagatatgttttataacctgtgtaaatgatgaaagactttatgaggaatgtcttgtatatataaatagcctagacattcctaaaaactttagcatagaaacagtagctttaagaggagccgattctattgcctctgcttataataaagctatgagagaaacagattctaagtataaggtatacttacatcaagatgcttttataattaataaaaatttcatatatgacattttagagatatttaaaaaaaatacagatgtaggaatgattggtgtagctggagtaaaagatatacctgtgaatggaatttggtgggattctgataaaaaagcagggaaagtatatgatagccatacaggtaaaatggatatttatgaatttagtaactttgaagaatgttttaatgaagttatggctatagatggattaattatgattactcaatatgatgtattttggagagaggataagtttgatgggtggcatttttatgatttgtcacagagtatggaatttagacaaaataaatacaaagttattgtaccaaaacaaaataagccttggtgtatgcatgattctggagtagcaaatataaataatggatatgatgaatataggataaaatttgtaaaagagtacataaatcttgatttatatagagaaaatttttatgaatttgataagaagaaagcaagtaccatacttaagagtaataagcatgtaatggattgtatgaaagaggagcttacagaacaattaagattaaagaattataaggatgttttagatattgtttctaaaattgctcatttttctgtttttaatcatactggcttgtattcttgtgaaaaatgtgagagagcattgctagaatgtgcaaataatttaccagaaatagaaaatacgaaattatttacaaaaaaagatttaaaaagaagaaaagtattacatgttttaagtgaaggatattcaacaggagggcatacaagactagttaaaaattggattgagattgacaaagattctgttcattcagttgtaactacatggcaatcagatacactgccagactggttattaaaagcaatagatgatagtggtggcgaagttatatctttggatttaatttcagatgattatttaaaaagagctgtagctttgaggaaaatagcttatgactgggctgatatagttattttatatgttcatatgtgggatacaatacctgttgttgcttttggagttgatgggaaaatacctattttacatgttaatcactatgatagtactttttggttagggacaagtattgcagatattgtcattgattttagcgaagctagtcaattaattacattagataaaagaggcatagataaatctgaaatattaccaatgccattaaaagaaaaagaagtattttcaaaatctgaagttagaaaacgatataatttggaggatgatgtgacaataatattgactattgctagtgaaagaaaatacaatagtgtaaatgatattaattactttaaaattgctaaaacattgattgaaaatacagataatacaattattattgttgtaggagttgatacagagaatctctattggaaaactttaagtaacgttacagataatagagttatatgttttggaacaacagcaaatatagacgatttttataagatttcggatatatacctagagtctttcatggtagggagtcatacttcaaaattagatgcaattttatatgatttaattcctgttaagtttaaaaatgaagtttcaccaatttttacaaatatgtggaattttatagataagtttgattataagaatataaaagaggttatagacatgataagaaggtacaatactagtgaatttgacagggataagataaaagaaaaacaatcagaaataaaacattttgttatagataaacactgtattgaaataaaaaactatatagacaaaatatataaagaggctaatcatcataaagttaagtatgatttatataaaaatgatgaaatcgaagactatcagctttttgttgcattatatggttatatggtaaaaaataaaaacatgtcataggtgataaaatgaacaatattcatatcaataaatttgaaaaaagctgtgaaaaaaactgggattattttgtagaaaataaatctataaatggtacatttctgcaaactagaaatttccttaattatcatgaagaaggaaaattcactgaccactcattaataatatataaaggtgaagaaatactagcagtcgtacctgcatgtgaaacttatgaaaatggtgaaagagtatttttttctcatttaggaagcacttttggaggtattataataagaagtggttttaatgatattaggcatgtaaatgctattacaaataagttagaaacatatttacaggaacaaagtttcaataaagtatatttaaaaaatacatcaagaatattttgtaaagaggatacttcattactagaatattttctatttaagaataattacatgttttatgatgaattaagtatgtttttagaattaagtaagtataaaaaagatatattagctaattttagatatagtaaaagaagatattttaaatattctttgaagaataatcttacctttaaaagattgtatagtgatgaggatatagtttgtttttttaatttactttctaattgtttagatagtaaaggagctaaagtaatacattcagtagaagaacttttggagtttaaaaataatagattaaaagatattgtagaattttatgcagtatatattgatgacattatgatttgtgggagcatggtatttaactttcaagaaagagtttatcatactcaatatctagcatcaaattcgacatataataaatattatccaatgatatttttatactataatctaataaaagatgctttagagagaaattttaagtatctttcttttggaattagcactctaaatagaggcaaatacttagacgagggtttagctacatttaaagaaggttttggttcaagtgcaatttgcaacagaacatactataaaaatataaataagtgataatcatgttttatagagtttttagagtatagtaaatatctagtactctaatattacataaaaataattagtttataaagaaggtttgtatatgaaaagattaatgattttaggctcaattaagtattttgagaatattgttatgtcagctaaaaaagagggaatatacacaattgtttgtgataatagaattgatactcctgcgaaaaagatttgtgatgaagcaatagatgttgatgtatttgattttgataaaataaaaagtatagctatagataaaaagatagatggaattttaactggatttacagattctttaatgaaaccatatgtttatattgcaaatgaactaaatttaccatgtgtgatttcttgcaatcaacttgaatctgtaactaataaggctattatgaaaaaatattttaaaaataatgcaatacctacaactgattattgtattattgaaagtctaaaagatttagaaaaaatacaaggattaaattttccacttgtaataaaacctgttgatggttatggttcaagaggtgtatattttgtatcaaatatagaagaattaatagaaaaatttgaatattctaaggaagcctcacaagatggacaagtaataattgaggaattttatgaaagtgaggaaatacaaggactagcttgggttcataatggagagtcacatgtattttatattggagatagagagcttgtaaatatacatacaggaagagctggaaaaccagatagattactttatccatcaaagtattgttttcaatatgaggaagaaataaaatctatatatcaaaatataacacaggcttttgatataaaaaatggacctctttatgtacaaatgttagtgggagcatatggaataaaggtatctgaagtaatgccaagattacctggaggttgtgactatatggctatttctcaaataacagatttagacataggaagtttatttgcaaactttagtgtgaataatgaagtaaattttgatgaaataaagaaatataatatgcatttatcaaaatgtgtatatgcattaccaatatacataagacctggaacaataaaaaagataaataatatagataaaatagaaaacttagattatgtcactcaatttctattattagtaaaagaaggagatacaataggattatatgaggatgagagacaggattgtggaagagtttatggaatagcaaataatatatttgatgcaaatataaagaagaaatgtattcatgaaatgatagaaatatttgatgaaaataatgaaaatatgatagaaaatttttaaataagggagtatgatagatatgaagctaataactcatgaacaaattatgtcattaaacatttctcagaaacaaggatatgaatggataaaagaatcttttttaacaaaaaaagattgtcaattaccaccaaaaataagcatggtagaagaaggtcatgtattttacaatgtaatgccgtccttaaatcataaccatatgattggtggaataaaaatggttacaagattgccagggagaaatccaagtttaaattcagatatatttctatacaatatgaaagatgctaaattaaaggctattttggatggtaattatattacagcttttagaactgctgctgttgctggtttggctattgatacttttgctaaaaaagattttaatactatttctattatgggtttaggtgtaactgcttctgctataatgaatatgctttcgtatactcttaaagataaaaatataaatataaagttacttaaatataaagaccaagcagagtcatttataaaaaagtatgaaaaaaatgaacaatttagttttgaaatatgtgatacacatgaagaacttattgtagattcagatgtagttatttctactgtgacatatacagatgaatatttatcagaatttaaatggtttaaaaaaggtgctttattattacctgtacatgttatgggatttggaaatgttgattatctatttgataaagtatatttagatgattataatcatttgaaacatctagaaaatatagatagatataaatattcttgtgaattttataatgttttaagtaaacaagctaaaggaagagaaaatgatgatgagagaataatatcttacaatataggtttgtcaatacatgatatattatttgcaaacaaaatttacgaattgtgtgaaacactaaattgtgaagagatagaattaaaagaaccaaaagaaaaatattggatatagtttatttcattcatatttacaataatttattgtaaatatgaatatgaagtaatatattgttagaaaattagcatgaataggatagataaatttatggataaatataatttaattaagttcttatctattggaaacgaatatataggaaatttagttgcattagaatcaaataaagcaataccttttgatataaagagagtttattacatatatgatgtaccaaacaatgtaaagagaggatttcatgcacacaaaaacttggaacaagtactagtttgcctaaatggaagtgtgaagataaaatgttatgatggtgtaaaagagagtatatttaatttacataaaaatgatgttggattgtatataggaacgggagtgtggcatgagatgtttgactttgatgaaaaaactgttttaatttctatagcatctgaacattacaatgaagaagattatattagagactataaagaatttttaaagtatttaaataatatgtagttattatacagttagtgatgtattttcttaattaaataaatttaagatagccatatagagaataaatagattaggatgtgaatttattgttggttaaatttaataatttattaaaacagttccaaactcataaagaagaatatgaacagaagattaaggatgtaatggaaagtggatattatatccttggaaatgaagtaaggcattttgaagaagaatttgctagctatgtaggtagcaaatattgtgttggtttagccagtggtttagatgcacttataattgcttttagagcattaggaataagtgaaggtgatgaagtaatcgtgcaatcaaatacatatattgctagtgttatgggaatcagcataaatggagcaacaccagtatttgtagaaccaaatgaatattataatatagattcatctaagatagaagaaaagataaatagcaaaacaaaagctatattagtagttcatttatatggtcaagcaagtaaaatgaaagatatacaagaattatgtgataagtataacttgtatttaattgaagattgtgctcaatctcatggagctaaatatgatggaaaaatgacaggaacatttggtgatataggttgttttagtttttatccaagtaaaaatttgggtgcatttggagatgcaggagctatagtaactagtaatgaggaaatagctgataaagtgaaaattcttagaaactatggttcagaaaagcgatattataataaatttgtcggatataattcaagattggacgaaattcaggcaggtttattaagagtaaaacttaaatatctaaatgaaattgaaattgaaaaatcaaaaatcgtagatagatatcttaatgaaattaataatcccaaagtcatacttccaaagatagaaaataattgtactcatgtatggcacttatttgttttacaagttgaaaaacgagatacatttatggaatacttaaagaaaaatggtatagagtctataatacattatccgataccaccacatctatctgaagcatatgcttatttgggatataaaaaggggagttttaatatagctgagaactattcagataaagttgttagtatacctttatttgtcggtatggaagatgaagaagttagttatataattaaaattataaatgaatattaaactaatcataataatatcaaaaataaattttctatatatcatttatttaaatttcgttaattgacatttttaaatattgatatattgtacaaataaaattgaaatatatggaagaatatagaataaagatgagatttgtctaatatttttataaattaaaaatattttcaaagagtttattataaaattgtagactatagtgtttataatctttgtaattattggtaactaaatttaaaaaataaaatatttaattatacacaaaaaagatatttaaaaaatttgttatttattgtatacttaagttaaaactaaataggcaaatctagagaaatctagtgacgcaaagctataggggctaaggtttgtatacacaaactatgtcagccagttgccaaaaagagttctaggtatattgtatacgtaggaagagtctaggatgactgcctttttggtggtcattttgttatggaaaaaatcacattatgtagtaaaaaacacctataataacatattataccaaatataatttaaaataaagataaattatctataaaagttactattttacaaaaaaaggcaactttataaagaaatatttaaatttatattaaaatatttttatatttttattaggatttacgaaaataatattagttttcttaccaaagtgatacattattatattaatgtaatagaaatgtaattaatttggatgaataaagaagtcattttttgtaatatagcaacttcattttttattaataagcaaaataaataaaatatattttgaggaggagtgagtgtgaatacatatgacattataaaaatgggattagatgcaactaatttaagaagtcagacaatagcaaataatatagccaatataaatactgaaggatataagagacattatgtaacttttgaagaaacattaaatgatgctatgccaaaaatagaagaaaaaacagacaattctaaaggattaagagtggatggcaataatgtagatatagaagaagaaaaagtaaatcaagcaatggcaacattacaatataatgctttgataagttttgcaaatggaaaaatagcaatgactaaatcaataataagtgggaggtaattaaaaggtgagtgtgttcagtggaatgagaatatctgctagtggattaacagcagaaagcttgaaaatggatatcatatcgtccaatgtagctaatataaatgccacaagaggtccaaatggagaagcatataggagaaaagttgtttcatttgaagaaaactatgataataaattaggtatgctaggagtaaaagttacatctgttgaagatgataaatcacctcttaaagaagtatatgacccatctcatccagatgcaaagccaaatggatatgtagaatatccaaatgtaaatatattggtagaaatgacagatttaataacagcttcacgagcatatgattctaacgtagatacattgaatgctcagaagtctatgatatcaaaagctttggaaataggaaagtagggataaattatgccaattacacaaattaacaatttaatgcaaggtgcaaagttagataatttgattggagaaacaaaaccattaactcttaataataaagaagaaaaaaagaactttgaagatgtaataatagatactatagataaagttaattttcaacaagtgacagcagatgatatgaaagaaaaatttataaaaggcgaagatgtttctatgcatgaagttatgttaataggtcaagaagcacagctatctatgcaatatttaatagaagttagaaataagattcatgatgcatatcaagaaatgaataaggtacaaatttagccttttgaacaggagtaataatcaatgatagccagttttaaaaataagattaaagagcaagttgctaaatctaggacaaagataagttctctaaaaaagggaactaaaatagcattaggtataggggttattgctatatgtttagcgctagtatttacagcaatatctgcgagcaaaaataagtatgcagtcttattttcagaactagatgttcaagatgctgcagatatatcagcagaattagagtctaaaaagatagatactaaggtaaagggaagtacgatttatgtacctagaacagaagttgataagttaaggctggagctagcaccaagtcttacaggtggttctaaaggatttgcactaatggatgatagttcatcaataggacttactgatgaagagtttcagattaagaagcaaagaatgatacaaggtgaaatagaaaaaacaataaagagttttccacaagtggaagatactagagtacatataacatttggagagtcatcagtatttgagaaggaggctattccagggagtgcagcagtttatttgatgttaaaaccagggacgactttggaaaaaaaccaaataaaatctgttatggcacttatatcaggaagtgttacaaatataccagagaaaaatgttcaagtcattgataacaaaatgaatttattatctgaaggtattttagaggatgaagatgttgatgaaaataatcaaccaacaaatagtttgattaatgttgataaaaataaggcatctgaacaagcattgaataaacaattagaaaagtctattttagaaatgctagaaccaatatttggtaaaggaaaagtaaaagccacagtaaatgctgatttaagttttgatacagctgaaaaaactgagataaaaattgaccctgataaagttgcaataaaggagacaaggtcgaaaaattcatctaaatctgctacaaataatgttcaaggtgtagatgctaacatgaataaccaaggaaataacaatggtactaatacagaagatagtttagatgagagttttgagtatgaaacaggtaagattgaaactcacactatagttgcgcctggagaacttaatagattgacagcttctgttgcaatagatggaaaaatagctaaaggtgtacaagctgatgtagaggatattgttaataatgctataggtatggatggagcgaggggagatactcttagcgttgtttcaatggtatttgacccagaagggaaggcagaagctaaacaagagctagaagagattaaaaaagaaggatttaaaaagaacataataaaagcagttattggagtagtggcagtggtagcaattggagctattggatacttaatatataagaaaagaagtgaacgagaagatatggattatgaagatgaagattatatttctaaatctgattctgttgataggaaggataatcctctattaggagatgacccagaactgacattagaggaagctgttaaaatgtatgcagaagaaaagccagaccaagtaacagagataataaaaacttggttaaatgagtaagggggatagaaagtgtccacggaaattacaaatgttaatgcgtttgacttaagtgatataaatgaaagtgataagaaagagaagatagaaggtgagggtttaaaaaaagctgctgtattattaatgacattaggaccaaatgtgtctagtgatataataaaaagcttgcctgataaacaagttcaaaaaataggtttagaaattgcaaatatttcttcaatagcttcaaaagaaagaagagaaatcttaaaagagtttgtagagataaatagggcaaaagattatgttatagaaggtgggcttgaatatgcaagagagttgttaagcaatgctttaggaaatgctaaagcaaacaaattacttgaaggtatatcaataaatacaagtacaaagccttttaaacatattataaaactagatgtaaagaaaatattagaaatacttagggatgaaagtgcacaaactatagctgttttacttgcacatatggagccagaaaatggagcagaagttttatcatacttagattttgatttacaaaatgaagtagctatgagaataagctcaatgggttcaatatctccagaagtaataaaggtaattgaaagttcattagaagataaattacactcaataagtggtgatgattttaaggattatggaggagtgtctaccttagttcaaatattgattaattctgatagaaaaacagaaaagaatattttgggaactattgaagaacaagacccggctttagcagctcaaattaaatctcatatatttgtctttgaagatattgtcaagttagatgatataagtatacaaaaagtattaaaagaagtgactatgaaagatttagtatatgccttaaagggtgtggatgatgagatttcagatgctatatatagaaatcaatcttctagagcagcagatgcacttaaagaagaaatggaaatggttggtgtcataaaagttacacaggttgaggctgctcaacaaaagatagcaaatatagtaagaaaacttgaaagagaaggtgccataactattgtaaggaattttggtggtgactttgttgaataataagattattaaaagtaaaaaagcatcatataaaggagtgctagatttaaccataatagataaagttagagtgggagaatcaaatgtaaataaagaaaatgattgtagatttagagatgaggtaataaaagaagctatagaatctgctgagataaaaaagaatgagatattagaagaagcaaaaatgaatgcacaaaatatagaaaaacaagcatatgaaaaagggtatagtcaaggtcaaaaaaatggatatgaagatggatataaagagtcatatgatgaatatacccaaaaagctaaagatgaagcagattttataaaaaatcaggcagacttaatactattacaagctaatgagaagatgactgagtacataaaagaaaaaaataaagagattgtaagacttgctattaatatggctagttctgttctaaaaaagcatttcgaagatgaagaatctatgagtgatttgttaaagcaaattattcaagattatgaaggaagtagttcatttatagtaagatgtaattctttctataaagataatatagagaaagagtttgaattattcaaagaggaaacatcactaaaatcaagtgtatttgttattgcagatgatagtatagataaaggcaatgctatcatccaaaaggaaaatggaagaataatagttggtatcgattgtgctatggaaaaactaaaagaagaattgcttggtgaataaagtatgtataaaactgatatatctatagattttgacaaaataaataagaaaatagaaaatttagaactcactatatcagaaggtagagtaaagaagataataggacttactgtagaagttgaaggaataaaagcttttgttggggagttatgtgttatatacaatcaagtcaataaaccagtgaattgtgaagtagtgggttttaaagataaagaagtcatattaatggcgttgggagagctaacattgatagctcctggttgtaaagttatttctaagggaatacctttaagtgttatgtgtagcgataatttactaggtaaagtacttgatggtcttggaaatcctatagacaactcagatgctgttttaggagatagatacaacttgaacaatgaacctcctgacccaatgaagagaaaaaagatacgaaatataatggaaacaggtgtaagagcaatagatgcatttactacttgtggtgaaggacagagaatagggatatttgcaggaagtggagtaggtaagagtacgactctaggtatgattgctaggaatgcaaaagcagatgtaaatgtaattgcccttattggagaaagaggaagagaggtactagattttattgataaagatttaggtgaagagggaatgaaaaaatctgttgttgtatgtgcaacatcagataaagctcctttggttaggctaaaaggtgctcttactgctactgcaatagcagagtattttagagaccagggaaaaaaagtaatacttatgatggattcagtaactagatttgctatggcacaaagagaagttggtatagcaataggagaaccaccagctcaaaaaggatatacaccatctgtatttgctattttaccaaaacttatggagagaacagggacatcagataaaggttctataactgcattttatacagtattagttgatggagatgactttaatgagccaatagcagatacaacaagagggatacttgatggtcatatagttttatctagagacttggcaaataagaatcattatccttctatagatgtattgaacagtttaagcagacttatgaatgagattgcttcaaaagaagacataaaaatagcatcttttgcgagagatatgcttgctgagtatagagaagcagaagatttgataaatataggtgcatatgcttcaggtacaaacaaaaaaatagatgaagcaatctactatcatgagcatattattaattttttaaaacaaggaataaatgaaaagagttcttttaatgaaactataagtagtttaagaagaatctttgaataaacaatttaaaaaaatatttgaataggttgtgatggaattggataaaaattttaagtttagattacagaaagttttagacttaaaaataaaagatgaagaagagataaaaatggaatttgctaagattcaacaaaaaaaaatagatatagagagcaatttagaaaacttagaaagtaattacagcaaatattctataagtaaaaataatgatagtgttcaaaatcaaaaaataactattaactatttgttagctttaaacaactctataatggatttatcagaagagctggataagtcgacaaatgaacttgaaaaagctagaaagcagcttataagcaaacagatagagagaaagtcattagaaaaattaaaagaaaaaaaatatggacagtattataaagaagaacagttaaaagaacaaagcactaatgatgagtttgcaagcatgagttatttgagaaatagacaagttctataaaatagtaggaagtgaggatattattgtatgaagatacaagcagattcttataatattattaaagatattgggaatagaaaaagctcatctaagaataaaaatataaaaaataataaatttgaagataatctatataaggcaacagaccataaaaaggttaaagatagaagagaaacaagtaagcaaaatgttagttcagataaacgggaaaatagtgataatgagtgtcatttagatgaagataaaagtaatcacttagaagatgaaaatacatatgaaaaagattgtagtaataataatgaagctttacatcaattactgaatcttttaaaagataattacaaaaaagataaagatataaacactatattgaataatctaaaaaaactaagtatatcagatgaattaaaacaagaacttaagcttaataaaaatatattaaataagattgcaaatcaaaatttagagttaaatagagctagtacaaataaccctaatgatatagaaaatttagacataatgaagttaagagaacttttagaaaataatgctagtgaagatattgaagtaattagtaaaactacagaaaatgatactaaaagcatagacttgtacagttttgacagcaatagaatagatactcttaactcaaataaacagaaagatgatagttctgatattttggaaaaactagcaggggtaaatggaaataagagtggaaattttggacaagtaataaataaaagcgttgatatgaataaaattaaaaatgataatgttaatttaaaacagatagaatcaaatgtaatggatgattctataaaagctattaagcatatgaaaacaaatgatatacaagaattgacaattaaattaagaccaaaagaattaggagatatgaacatacaattgttaaaagatggtgaaagtatgagagctgttgtgactgttttcaacaaagatgtctttgactctataaataaaaacatagcagatttaaagcaacatcttgaacttacaaatgtaaatataaaagatgtatcagtgcaaatgcatagcgataatacaaatacatctgatacctttgataaagcatttgaacaacagaatagacaaaataaccaagaaaacatgagtaagcaaaatacaaatgataagcgtaacaatgtagtcatagaagatgagattaaagaaaatattattgatgatgatagagtagatttactagcttagtaagggggaagtattgcatgtacggaatagcaacggctttggcaggaactcaggtaaactataggtcaaataatttaagccaacttgaaagaaatattaatgatattgccaataaacaagttagaagtaaaggaaatcagacagtaacagacaatgggactccaattataggacaaggcgatgatgctgataaagatttgtttatgaagattcttgtagcacagatgggtaatcaagacccaatgaatccacaagacccaacagaatatgtatcacaattagcacagtttgcaactttagaaaagatgtcagctatgaatgataagctagatatacttttagccttaagcaattccactctaataaattctgctttgagtatggcaacatcattaattggtaaagaagtagaagtatctggggaagaggaagaagatgaaaacattgtaggagtagtaaaatccacatatataaaagatggggaagtacacttagaattagaagtagatggaagtgacaaaactgtaggtgttaaatatgaaaaattacttaaaataggagaggtagatgcaaattcaggagaagaaaatgactcttcagaacaagaatctccagaagaagtataatattaaatgagaaaagaggtaaatttatgataaaagcaatgtattcaggtgtaagtggaatgaaagcaaatcaaacaaaactagatgtaataggtaacaatgtagccaacgctggaactacttcttttaagaaaagttcagctagaataacagattcattttatcaaactgtactatatgcaagtgctccaacagcggcattagggggaacaaacttaggacaagtaggtgtaggtagtaagatatcaagtataaataaagatatgacacaaggaaatgtacaaccaactaataggccatctgatttaatgatagatggagatggatatcttccagtagtaagacaaggaacagttatgtatacgagagatggttcttttaatttagatacaggatttaaagcagctgatggtgctttgaagaatattaaaggtggaagacttgtaaatggtgatggatatatgttacaaggtgtgatttatgatggggaatataaagctgatactggagaattcattaaaaagggtgatgctaaaggaaaagagcctattgtaataccacttcaaagtataagtcctaaggatggaacagttcaaaatgtactagagtataatatatcaaaggatggaacagtagaatttttattgagtgatggtcaaagaactcaatttgtctatgatatacctgatggtgctaaggtaggagatacacctgctggaatagataaattaaaaggtacaatacaaaaagtgcaaacatatgcattccaaaatccagcaggactagatgcagaaggaggaaacttattcaagccatcagcaaactcaggagatccacaaatagcaggagctacaggaaacataatacaaggggcaatagaagcttccaatgtagatatagcagaagaatttacagaaatgataatagcaagtaggtctttccaagcaaacagtaaaataatatcgacatcagacgaaatacttcaagaaataataaatcttaagagatagtaggtacatattatgataagagtaacggatttaaacggaagaagatacatattaaattcagaccttatagtgagaattgactctgtaccagaaagtaggattctccttacaacaggagaaaaaaatcttgtaaaagagtcagtagatgagatagtagataaagtaataaagtataaaagaaaagtaaatgtaggttatattaggagtgaaaaataatgaaaaaaacagattcactaacattcattggactaatattatctacagtattagttttatttggggcagtaaaaggaagtagttcaggattgaaaagttttttcgattttgcatctatattaatcacagtatttgggtcatttggagctttgatgattacatttactattgatgatataaaacttataaaagatgcgctacaatactcattcaagacaatgaatatatcgaaattagacttattaaatcaatttaaaacactttctaaaaaagcaagaagagaaggacttttatctatagaaagtgatgtaatgaaaatacaagacccatttatgaaaaaagggttagagttatgtattgatggccttgaagtaaatgaaataaggtctatactagaactcgaaatagattctgttgaagaaaccaataacagatattctaaactatttaaaacttgggggactttcgcacctgcatttggtatgttgggaactctaataggtttaatacaaatgttatctgaccttacatctccagatttaatagcatcgggtatgggaaaagcattaattacgacattttatggttctttacttgctaatatcgctttgaacccaattgcatataatatagatgagaagactgaaaaagagatttatgtaaaggaaatgatgctggaaggtataataagcatacaatctggggagagcagcatagtagttgaggaacgtttagctacatacctttcaaacaatgagaagctagaaattatgaaatccaataaaaatacagaaagagcaatgagtaatggcgcgtaaaaaaaataagaaaaaggatgagataaatccagatgcatggttggctacttatgcagatactataacactgattcttacattttttgtgttattgtatgctacatcagttgtagatatggaaaaatttaaaaacatagcagatgcgttaaaaggtcagttttctgggataagtatgttcagtacaggttcaagtacaagtgagaagtctccaatagagagtgttttagtggataaaaatgataagtcaaatttagaacaggatttaaaagataaagttaataattctaacttacaaaatagtgtaacagtcaaagatgatagtagagggattttactagaactagatgattcaattttatttgactctgggatttctgaattaaaagcagatagtaaagccactcttaataaagtatatgacatgataaagatgatgaaaaataagatagttatagaaggccatactgataatgtacctgtaaaatcaagtacacatgaatccaattgggatttatcttctagtagagcagtaagtgttgtaagatactttgtagaagaaaagggcatggaccctagactattttcggcaacaggatgtggagagtatcaacctttggtttcaaatgaaacagcaaagggaagggctgagaatagaagagttaatatacttataactattgactaggaggaagaggtttgttcaaaaataaaaaaattattataattattttgatactgattattttctcagcaggagcaggtttttttatattaggagaaggtggaaataaacaaattgacaagattgcaggtttgtttattccaacagggaaaggcaaagatgaagtaaagaccgaaaatcttgacttagaagagatggtattaaagctagctgatgaaggtgtaagatatttaaaagtatcaataactgtatcttatgattcttcatataaagatatagaaaaaaatacgcctttaattagggataatattataaattgttttatggcaaaaagggcagatgattttactgctgataatttaaagaacataaaagaagaaattaaaaatacattaaatatacaactaggtgaaaatgtaattcaaaatatatatttcacaaatatagtagtgcaataaaaggatggtaagacatgatactttatttactaaaaatattaatatgtatcccaataattttaatattgatagtcttatctttaaaaattagccaaggaactttattaaaaaaatataatgataaatatataaaaatactagatattgtaaatataagtaaaaacaatagcataataattttaaaaataggtgaagaaggatgcattatggcatcttcttcctctagcatgaataaaataaaagatttgaccaaagaagaaatattaagaatagaaaacgacattaaagaaagaaattttaaaattcaagattttaaaatggaaagaattaaaaagaaatatgatttcagtagatatattggaaaatttacaaaaaaggaagataagtaaatggaactattatcaaaattacctttggctgatgtaccatatacaagttcaatgcaattgtttttatttctaactgcattaatgtttttaccatttgtaatgtttatgatgacaagctttgtcagaatagttataagtttatcatttttgaaatcagcattaggagcacagcaagcaattccaagccaaattttggtagggcttgcaatagtattgacaatatttataatgagaccagtattaaatgagataaacgaaaaggcattacaaccatatatgaaagaagaagttactatggaagaagctatgaaggaagcagagggacctattaaagaatttttattaaagcaaaccagacagacagatttagatttatttgtagaacaggctggtttgaaagaaaagaaattaactcgtgaaaatataccactatctgttgtagttccagcatttgctataagtgaactaaaaactgcttttcaaataggttttttaatatatataccatttttgataatagaccttgttgtggcaagtgttttgatgtctatgggtatgtttatgttgcctccagtcatgatatcattaccgtttaagttattattatttgtaatggtggatggatggaacttgatagtaaaaacattgatattgggatttggataggagaaaaatagtatgagtgaatttatgataatgagtgttcttaaaaatggcatgtttacaggagctatgattgcagctccagtactcattgtttctcttgtagttgggcttttaataagtgtgtttcaagctacaactcaaatccaagagcaaactttgacttttgtaccaaaactaatagcaattcttttagtagtagctattggtggaagctggatgttacatactcttattagctttacttcggagatattcaatatgatgtctcttataactaaataagtaggatatatatgatttttgtatttattagaatagtggcattctttggaacactaaggatactatttccagctggtacacctgctttatttaagtcgctctttgcaatcattatatcaatattgatttcaagtactatgcaaattgaatatgcaacaaatatagacaacattgtattgtttaccttatatggtataaatgagaccataactggcattatgcttggatatataaccaatctatgtttttatagtatcagaatggcaggttctatgatggatcaacagatgggattatcaatgattaatatgtttgacccaaattcaatgactcagacaactttaattgataatcttatgaactggacagcacgtatgatattttttagcatggatggtcatcatgttttaattagaggcataaggtatagttttgagttaattccaatagggaaatcattcgtagataataatatagattatataataaacatatttgtgcagtgctttttaactggattcaaaatagcaatacctattgtactttgtctgcttatggcagattttatattagggcttatatcaagaagtgtacctcaactaaatgtaatgataattggtatgccattaaaaatactggttggtattgcgttatttatcatatcaatacctttaattgtcaatcaaataagtcatttattaagtcaaataccaaagatgtatgagggaactttcgcactagctcctatgttttttatgggttcaacagataaaacagaagaggctactccaaagaaaaagggagaacaaagaaaaaaaggtaatatagcaaagagtaaagaattacccgttgcaatgactctacttgcattcactttattagtacctacattattttcatatgtagtggatacacttaaatcttctcttaattattttttgagtctagatttttatatgaatataaattattcaagtatagagaaattagttatagcaggattaatggatttttttaagatatttttaccaatagctattccattcttagttttaggtatagtcgcaaacctatttcaagtgggaatactgtttactggtgaaactttaaaacccaatttatcaaaattaaatccagttagtggatttaaaaacatgttttctatgagaagtttgtcaaccttaataaaggatacagcgattatatctattttggcttacataggatatacattcttccaagataattatttagatatattaaagctaggtaacatatacctgccaactttaatgtacacagttaaagatttagtatattcaatattaagtaagatttgtgtagctatgatagttatagcagttgcagattatgtttatcaaagatacagtcataaaaagcaacttagaatgacaaaacaagaagttaaagatgaatataaaaactcagaaggagacccagaaataaaagctaagataaaacaaaaacaaagacaaatttcgtctcaaagaaccatgcaagcagtaccaagtgctactgtaatagtaaccaatcccacccacttatctatagcagtgagatatgaaaaagggaaagaccaagctccagtagtggtggcaaaaggtgcagattatttagcttttaaaataagggaaattgcaaagggaaatgacatacctataatagaaaataaacctattgctaggttgttatataagcaagtagaaatagaccaagaaattccagaggacatgtatcaagcttttgcagagatattagtagcagtatataaaatcaaaaatagatacaaagtcctcaaaaggtaggataagtaatgaataagtttaatttaaaggaaaatatggacgtaatagtggcatttggtgttgtagggattgttcttatgatgatagtgccgttacctacatttatattagatattttactggcaattaacataagtttatctgtgctaattttactaatgacattatttacaacaaatgtacttgatttatctatatttccaacagtgttacttgtgacaacactatttagattgggattaaatctttcatcaactagattgattttaacacagggatatgcaggtgaagttatagaggcatttggaagttttgttgtaggtggaaattacgtagtaggaataattatattcttaattatattaattgttcaatttgttgttataaccaatggttctggaagagtatctgaagtaacagctagatttacgttagatgccatgccaggtaagcagatgagtatagatgcagatttaaatgcaggagttatagatgacaaaactgctagaaaaagaagaaaagagcttcaacaagaagcagatttttatggctctatggatggagcaaataagtttgtaaagggagatgccatagcaggtcttatagtaacagcaataaacataataggtggaattgtaataggagctgtaatgctgaatatgactcttatgggtgcagcacagacatatgtaagacttactataggggatggtcttgtaagccagatacctgctctattaatatctacatcagcgggtataatcgtaacaagagcttctactgatgaaaactttggtggattagtaagtaaacagttaacggcaataccaaaagcagtaatgatgactggttgtgttctaatcgtacttggtatgatgcctggattacctaaaccagcatttttttcactaggtataggtgctatagcagcaggttactttttaggaagagaaaagaaagatactttagaagacttggagtttgaaaaacctgatatggtaaatccagataaaaatgaagtagaagatgtaacaaacttaataaatgtagaatcaatagaagtagaaattggatatggtttaatatctttagctgatgaatcagcaggaggagatttacttcagagaatagcatcaataagaagacaatgtgcaatagacatgggtatagtcgtgcaacccataagaataagagataatttacagttaaatccaaaccaatacaatataaaaataaagggaaatgtagttggtgggtatgagataatgcctaatatggttttatgtatggaccctatgaatcaaggatttagtatatttggaataaagacaattgagcctacttttggaatagaggcactttggatagaaagtgacaaggtagaagatgcagagataaagggttatacagttgtagattcatccacaatacttataactcacttactagatataataaaatcaaatgcacacgaattactgggaagacaagaagttaagactattatagatgcagcaagagaaaattatagtgctgtagtagatgaattgataccagatttaatgacacttggtgaaattcaaaaagtacttaaaaatctgttaagagaaaaagtaaatataaaggatagggttacaatacttgaaacgcttgcagaccagtctagaaatacaaaagatatagagcttcttactgaatatgtaagaatagccttggctagaagtatttgtaataatttagttgatgatgataagacaattgtagtggctacattgtctccagaaactgaagagttggtatctaataatttacaaaggtctgtaaatggaacttatccagcagttgacccagaaaatacaaataaaatatttgagagtatacaagaagtaatgaacaatgtatatttcaatcataatataccagtaatagtagtatcaccaaagataagagctccatttagaaaattagttgaaattgtatatcctaatttgactgtattatcattaaatgaaatacctaacgatattaaaatcaaagcagaaggtgtggtgagcatatatgatgacgaaaaagtatacagctaacacaattcaggatgctatgaatctagccaaaatggaattgggtgacaatattacattaatagataaaaaagaagtaagaaagtctggaatacaaggtatcttttcaaagaaagatattgaactaactattggatgggaaaagagagaaaacgtagaacaaaaagatttaaaacgagagatagaacaattaaagttaattattaacaatatggggtttgataataagaatgataatgatatagataaaatatgtaaaaatctactaagtttagaattaaatgaagaaattgtagaatctataagaattgatttgcaagaaatgaagttcaatggaattgatacaagcaaaaatttagtagaaattttaaagaaaaagattaaaatagaaaatcaagcaataaatggtaaaattgctctagtcggaccaccaggagtaggtaaaacgactacaatagcaaagttagccgcaaaattagtttttgaagaaaataaaaaagtaggagtaataactatagatacatacaggattggtgctgtagaacagttgaagatatatactgatataatgaatattccttttaaaggggtaataagtcccgatgaaatggaattggcacttgatgagatgaaagattgtgatgttgtattaatagatacaacaggtagaggctataaaaactctatgcaaatactagaaatcaaaaatcttatagataaagctgaaactgataatatacatttagttgtgaattgtacaacaagagaaagtgatacaaaagcaattatagattcatatagaaatgtgaattttaaaagcttaataattacaaagctagatgaaacaataacatatggctcaatatttaacataatgaattatgcacaaaaaccaatatcatatattacaacaggacaaaatgttcctgatgatattataaaacctaatgaagataagattataaggttactattaggagttgaaagtatatgatagaccaagctcaaattttgagaaaaatggcaatggaaaaaagaggacttgatgagtttatagtagagaatgagaatgtacctaagataattacaatagcttctggtaaaggcggtgttggaaagagtaatctcgctacaaatttgtctatatgcttgaccaaacttaataaaaaagttcttatattagatgcagacataggaatgtctaatatagatataataatgggggtaaatgtaaaagggactataattgatgtaattaatggcgaaaaaaatatagaagatataatttcacagactaagtatggtgtaaatataatatctggaggttctgcccttaatcatatagaagactttacagaagctcaaagaaataagtttatacatagcatagaacagattcacgatgtggattttataataattgatacaggagctggtatgagcaaaagcctattgtcatttatatactgtagtactgaatttttcttaataacaactccagaaccgacatcattgactgacgcatatagtttattaaaagctataagtaattttggcataaagagaagtgcaaatataataatcaatagggtaattgatttagaagaagcaaaatctacatacaaaagaataaaaatggttgtggacaaatttctaaaccttaatctagaattgtatggatatataatagatgacaaaaaagtaagtttatgtgtaaaaaaacagataccattcattttagaatatcctacaagtattgcatcaaaatgtattatagccatagcaaagagaatggtaagtcagtcaagagaagatattgttgataataaaagttttctaagaaagatgtttagtatatttaaaagctaaggaggcgtagttaatgaatagagaagaattaataaaagagaatatgcctcttgtaaagagtatagcaagaaaattttttataccagggaaaggttttgaatatcaagacttagtaaatagtggagtcattggattgattgatgcaataaataaatttgatgctgaaaagggggcaaagttttctagttactcttatataaaaataaaatctgctatattagatgaaattagaaatcaaagtccaatttctaaacataatctaactaaagtaaataagtataatagagtggtagaaaagttgcaatctaaattattaagagagccaacttcatatgaaattgcaaaagaattaaatgtttcagaaaaagaacttcatgatatcgaaagtaatatagacatgttaaatattgtatcattaaactatgtaatctttgaagatacaaatgaaactgtacaagatgtaataagtgatagagaagaggaagctccagaaaatataatagaagaagaagaaaagttagagattctatctaaagcaattagtaatttaaatgaaagagaaaaattaatactttcactgtactattatgaagatttaaatctaaaggagatagggaaagtgctaggtgtttcagaatcaagagtttcacaactccacagaaaatcaataagaaacttaagaaacaagataaaagaacttaaatattctatatagatggtgattgataagatgatacaaattatattaatagtagtgtctattttaataatagtaactatagttataaatttacataaggaatcaaaaaataaagataacagatactttgataaaatatttgagcaagaatatgaagcaaatgatagattaataattgcagaaaaaagaagattctttttagacaaagtacttgctgaaataagaagtaataatcatataaaagtttatgaaaattataacctaataaaggctaatgaagaaagaaaggaaaacatatttatagaatcaaaaaaggaagtaagacaagaaaatgagttatctcttaaagtgaaacatcttataagttcaggttatgatgatgtggaaatatgtaagatgctagatattggaaagggggaactgtcattaataaggagttgttacaaaatataaggatattattatgtgataaaaaagtattcttaggaataggtattggtatattaatatcaactttatgcataatgctttttagtaataatgatatgagtaaggcagagatagaaaaaaaggccagagcgttaggcatgaaatatacaagtgagatgaaagttttagaatagatgatactgtttagacatttacaaaaaaggaggtcataatgtgataagaggattatatacagcagtttctgctatgataactaatcaacaaaagcaaaatgttgttgtcaataacctagctaatatggatacaaatggatataaaagtaaacaacttttgactaaaagttttgatgaattaaagttggagggttacaataactacgcaaatggaactaaacaaaagcagattataggcgatataagtccaggtatttctatggatgaaactatcacaaattttaatcaaggacctataaaaactactgataataaaatggatgtagctattcaaggtaagggattttttctagttagtgatgcagctggaaatcaattttacactagaaatgggaacttcagaacagacaatcaaggtgaccttataacaagtgaagggtattatgtacttgggacgaatactgctactggtgctgtaggtcatataaatgtaggaaatcaaaaatttgaagtggcaaaagataatacaatatcactagatggaaatgctatgtataaattcaatattgtagattttaatgactacaataacttaaaaaaagaaggagataacttgtattctggaggaggagctatgaaagtaaataatgcacttacaatacaaagtgcgatagagtcttctaatgtagatatggtatctgaaattaataatatgatgaccatatcaagagaatatgaggcaaatcaaaagataattcaggctatggattctaaattagcaaaaatagcaagtgagattggttcagtaagataggtgataggaggtgaatttttatgtacacaatgttttatactagtaaaacagctttatcagcaaatcaaagtaaactagatataatatctaacaatatagcaaattctgattcaacaggatataaaaaaataaatatggaatattctgatttagtggatgaagtactaaatagaccatcatatcctacaaatggcaatgatatatcgactggaacaggagctaaggcaacagctcccatgagaatttatgaacaaggtgcattggcccctacagatagtaagagtaatttggcgatagatggagaaggattctttagagtgataagaaaagatggtacatatgcatatacaagaaatggtggatttaatatagatggtttaggtaagattgtagatgataatggaaatatattagatgttcaatttgatgcaggatataactataataatacgaatatagatagcacaaacttaacagtttcaagaaatggcgagttattcgtagataataaaaaaataggaaaaatcaatttatatcaacctataggaactcaaaattttatatctgaaggagatagtttattcgtcgcaactgatgcagcacagattaaacaagttgagaaagtagatatagttcaaggctatagagagaggtcaaatgtttctttacaagaagaatttgttgacttaatagccactcaaagagcatttcaaatgaactcaaagggaataaagacagcagatgaaatgtggcaaatagctaataatttaagagctaaataattatgtaaggtgaggaatattcatgaatgatatgaaagagtacgattttggcaaacctcagagttattcaagagaaaatttaacttgtttaaattttttattagctgaattttgtaaaaaatataaaaactatataatttatgaacttaagtgtaattctagtatgattgttgatagtatagaccaagtaaattatcagacttttttagatagagtaacttcttcatgtgtagtagtacaaaatgcaatggaacctgttatgaaaaacttttcttttagaatagatagaagtgtagctgatatgtggattgatataacttctggaggaactggagttataaaggataatgatagagagcttacagaacttgataaaaaagtgcttttacatcttatggatgatttagtaagaaatatgcacttatttgaaggttttgaaaatatacaagtattggatacacatacacatattaatttaccacaattatgttctccaactgcaccagtatgcgttgtagatttaaaagtgctaaatgataatgagtatattggaagtgtttctctttgttttccgtataatggtttagaggctctattagaaagtatatctgttatagaattttttgataatgatgtaggagatgattcagaggaatttaccaaaaaaatctataatagtgtatctaatatagaattatcagttattgcagagataggaaaagtatcaattaatgttgaagacttacttaaactagaagttggagatgtaatagtaacaaataaaaaaataaatgattatatagatatatttgtagaaaattcaaaatcatatacagcaacaccaggatttatatcaagcaaaaaaggtgtaaaaataaatgatgctgttggaaaagaggtgtagttatggacaatagtaatcttatttcagatgaagaagcaaagatgttattaaatgataaagttgaaagtgaagttgatggggatgatgagttagccttagatgtctctgaagttaatcgaaataatatacaaaggatacttgaccttaagttagaattatctgtagttatagggagaactaagatgactctaagagatattttaaatttacataaaggttctcttattgaactgaatactttagcagaccaagatgtggaaatactaatagataataaggttttggcttatggaaaagtagtggtggtagatttaaattttggtgtaaagataacaagtatagtaagtgaagaagacatggtaaaatctcttgtttagagataacatcaattaatacttaaggcatgaggtggtacttattttaaacttaaatgatataaaaaaagatatactaaaactcaataaaaaagactcatgttctctatataatgaatctattaataatataaataataattgtatatcaactggattaaaatttttaaaacaagcaagagatttaaacccagatgatgttgatatattaaatctcacaggtcttgtaaacttactaaaatgtaattttgatgatgctgtagaaagtttctataagagttcactttgtgaaaaaactgctctgtgtgaaaagtatataaacatgcttacatctgaggagtttttaattttctttgaaaagtacaatcaacttataaggttaataaataaaggaatgtataaagaagctatacaagggtttaaacttataactgaccaatactgtgatttaatagaaccttatgagttgcttgccttactgtatgacaaggaagaagaatatataaaatttgatgaatgtttagaagtattgaagattattgataaggaaaattatttattaaatcaagaaaataacacattagatatgtataatagtgctaatatacaaactaaaagtaatgtaaaagtagatgattataagaatgagtttttacataaaagtagtagtaaccataaaattaatgattataataatgtaactaaagaaaaaagttcaagcaaaaaccagaaaagttcagattctaataagaaaaaaagtattaaaaaaaataagtacctatatatagccataatattaggaatattattagtaggacaaagtatatatagttcttataagatgaataatttaactgataaaatatctaaaaataatgaaactaaaaatgaagagtcaatagattctaacttgactaagaaagaaaataatatagaagaaaatgaagatatgagtaaggcttctaatataaataagagtaataaaaacattaataaagaggctgatgtaaaatctaaaaaaaatactgtagaaaatgaagatgataaagattctgacttatttacagaggatgaattgatgtctaaggcgaatactttaaaatcagaaaaaaaaactaaatcttctatacaactatataagaaagttgcagatataggtgaaaataaagggaatacatctgaagcaacttatcaagttgctattctcagtgaaaagttaaaagactataaaactgctgaagaatattataaaatgtatgtagaaaattactcagaaaaagatgcttattttgatgaatcttattataatttagggatgatgtactataacaatggtgatttaaaaaattctaaattgacattaaagaagttagttaataaggtaccaaatagtatgtataataattcaaaagtaaaagaaattttaaaagaagaatagttaaattagataagaaaaataaattattttattttaaaataatatgattataatatattgacataccattttaaaaaatttaaaatattaattataaaatgaggagggataaaaaatggaatttgaaaaagggagtatttcaattcatacagaaaatatttttcctataattaaaaaatggttatactctgataaagacatatttataagagagcttataagtaatggatgtgatgcagtaagcaaacacaaaagacttgtatcactaggagaaatatcagaaaataagtcatcagattataaaattacagtatctgtaaataaaggagaaggtacacttaaatttattgacaatggaattggtatgactgaagaagagataaaaaaatacataaatcaagttgctttttcaggtgctgaagatttctttaataaatataaggataagatggaagagtcaaatgacataataggtcattttggattaggattttattctgcatttatggtgtctaaaaaggtacaaatagatacactttcatatacagaaggagcgactcctgtaagatggatatctgaaggtggtacagaatacgaaatatctgaatcagatgctagaaatgatagaggaactactataacactatttattgatgatgatagtaaagaatttttagatgaatttactgtaagaggaataataaataaatactgttctttcttaccagtagaaatatatttagaagatgttgaaagattagaaagagaagctaaagaagcagaagaaaaagctaaaaaacaaaaggaagatggaaaagaagagattgtagatgcaaaagtaattgagcctttaaacgacactaatcctctatggttaaaatctccaaaagactgtactgatgaggagtataaagagttttatagaaaggtattcaatgtatttgatgaacctttattttggatacatttaaatgtagattatcctttcaatttaaagggtatactttacttccctaaattaaaaaatgagtttgaactgactgaaggaaaagtaaaattatacaacaatcaagtgtttgtggctgacaatataaaagaagttataccagaatttttacttttattaaaaggtgttatagactgcccagacttaccattaaatgtatcaagaagtttcttacaaaatgacagggatgtaagcaaaatttctaaacatataattaaaaaagtagctgataagttaaaatctctttgtaaaaatgaaagagaagaatacaataagttttgggatgatatacaaatatttattaaatatggttgcttaaaagatgaaagtttctatgagaaggtaaaagaatgtatattattcaaaactattgatgatgagtatataacaatacaagattatttagaaaaatgtaaggacaaacatgaaaataaggtattttatgtaagtgataaggaacagcaatctcaatacattaaactatttaaagaatacgacttaagtgctgttgttttaaactcatcaatagatactcattttatttcatttatggaatataaagagaatggagttaagtttaatagaatagatgcagacctttctgatgtattaaaagataaaaatgaaaataaagatagtgaagaaaacaaagaagagatagctaagatagaaggtttgtttaaagaagctgttggagaaagagtgaagaattattctgtagaaggattgaaaaatgaagacactccagctatggtattagtatcagaacaatctattagaatggcagaaatgcagtcaagatttgctggaatggatttaggaatgaattttgaggaagaaaaaactcttgtaataaatgagaacagtccaataatcaaaaaattggtttctcttaaagatgatgaggaaaagaaagataagattacgcttatttgtaaccagatagcagatttagctttactttctaataaagaattaaagccagatgagttagattcatttgtacaaagaagtaataagcttatgagtcttttgatagaattataagattgaatttgaatacattgaagcaaatttataaaaagtattcaatatcagtgatgagaaagaagtgtctcaaaatgaacttttcagttcatgaggcgctttttttatgtgaaattaaatttattttaatcatttcaacaatgaaaaatatatttatctctattttgagacagaccgttctttatttttttatctttggttaatttttaaatatttaagtaggttctaataaaaaactctatttagttaaatatagttaacttgatatataataagataatacatataattaagtaaaagattgttttttagtttatgtttaaatacataattacactttgttaaaaacataaaattattactaaagtagaaataggaggttttagcatgaattttaattataatttgccagtaaatatcttatttgggagaggcagaattaatgatgtgggaaaagaagtatctaaatatggcaaaaaagtattgatagtaacaggtaaaaatagtacaaagaaaactggattacttgataaaacaatagatttactaaaagactctaaaatagaatatgaagtttttgatagagtagaacaaaatcctcttataactactatatattcaggcgtagaaattataaaatcaactggatgtgattgtgttttagggcttggtggtggaagcattatggatgctgccaagagtatagctttttcttataaaaacccaggagatttaaatgattatatatttggaattagacaaggtgaagaagctttacctataatcttagttccaacaacatcaggtacaggtagtgaaggaaattgttttgcagtacttacaaattcagaaactaaagataaaaaatctataaagaagaatagtatgtatgcaaaagcatcaataattgacccagaacttatggttacaatgccaaagcatataattgcatcagttggatttgatgcacttgcccataatatggaagcatatctttctaatggaagaaaccctcttgcagatgtacaagctatttatgggattgaacttatatcagaaaacctaataaaggtatataatgatgttaatgatttagaagcatgggaaaaaataacacttgcaagtactattggaggaatgacgattggtacagcgggtacagccttgccacatggaatggagcatcctgtaagtggtcttagagatgtaatgcatggaaaaggacttgcagcgttgactcctactattatagaaagttcatgggatattgatattgaaagatttggtaatatttcaaaggtattaggaggaacttgtgcagaagattgttcagatgcaattagaaatttccttaaaaaaatagatttagatataaaactaagtgatttaggtattgaaaaatcagatatagattggttaactgataattgtatgaaaatatcagttgcaaatattaagagacatccaaagtattttaataaggaacaaataaaggaaatgtaccataagtctttataatttgactttacatatttagttttatataaaaattataaattaataataaaaaattataagtaattaatagtaaaaaaattgtgtatagaagttatatatataataaacttgtcttaagcttttattttactttctaataaataaaggagtttaaaaaagggaagattaattaagtaatattttataaaattcttcgatttaaaaactttaagtagaggtgaaataaatgtttaatcccaaaagaataatattcgaaaaaggaactttagacactgatgtgggcaaaaaaatatacaataaatttagagataataaagatgtagagataattaatatatcatcaaataggattaaagaacacattccaggtgaaaatctatatgaacaatatagaagtgggaagcagactatggtagttgggattagaaaaagtctgaagtttcaaacatgtaaaccttctgctaattatcaactaccacttgtcagtggatgtatgggaagatgtgagtattgttatttgaacacacaattaggtgataaaccatttataagggtgtttgtaaatgtagatgaaatacttgaacagacaaaaaaatatattgaagatagaaagccacaggtaaccatatttgaaggggcagctacatcagacccagttccagtagagccatatactaattctttgaagaaaacaatagagttttttggaagagaggaaaaaggaagatttagatttgttactaaatacagtgatgtggatagcttattggatgctgaacataataatcatacagaaatacgatttagtatcaatactcctagaattataaatgaacatgagcattatacagcctctgcaaataaaagaatagagtcagctgtaaaacttgctagggctggttatcagattggtttcataatagcacctgtgtttttatatgaaggttggaaagaagagtataaaaatctgattataagtataaaagaagctttaccaaaggattttgataaaaaaattatatttgaagttatatctcatagatatacaactaaagcaaaaaatagaatactagagatttatccagatacactattgccaatggaaaatgaggatagaaagtttaaatacggtcaatttggatatggtaagtacgtgtatgataaagaacaattagatgatatgaaagagttctttcttaaggaaataaatggagtatttaaaaatagtttaataaaatatataatatagcaaatcttacctaaagatttgctatattttatttttatatattttatgtttataataaagcaatgagatttagcactatcatataagaaaattaaaaagggcactatctatcaagaacattttttctagttttgatactataaagggtaagagtaacaaaaatatcaggaggagttatagtatgcatgcatgggagtctattcaaattacattggatttaatagaagcaaatttatcagaagaaatatcaattaatgaattagcaaataaagcaaatttatcaccattttactatcaaagactatttaaaagattggtaaataagactgtaatggagtatataaagcttcgtcgtcttgcaagagcttctgaatacttagcagaacataagaatcgtatacttgatgtagctttaaattttggatttgctagtcatgagacatttacacgttcctttaaaaaagcatatggattaactccagaaaaatatagagcaaatccagtaaaactcaatcactttattaagccagaattaattttaaattatgctatggttgatgaaggtgttccactgattgcagatgatatagtgattgaagtcaatcgtaagacattgagtaatccaaggacatttgttggaatagaaatagaagtacctatttgccagttggtgggtggtgaaacaactggaattgcaatagtagaggaattatggatgaaacttggaagtcaaagacataatataccaaatcaaattccaggtggaaatgaatttgctgctctttatatgggaaatgcaaaagaaggaaattgtatgtatatggcaggtgtagaggtagagtcaggtacatcagtagaaggatataatacttttgagttgccagctaaagaatatttagtatgtggatttgaggcagaaaactttaatgagttagttaattcagctgtttttaaagcagataaatttatggaaagatggatgaagaaacataatttaacaactactgattttgcaattgagatgtattaccccactacacctgaagcagcatatctggaacattggattgttccggttcctattgaacaatagaaaggatgatgaatatgaattggcaagatgcgttttttcaagatactaaacctacatttgagcaaattaatgaatttattaataatccattatgggacaagttaaataaaactttggtttctacttataatgtagaacctaagcttgaatacagtaaatgttcaatgcaaagaggttggaatgtaaaatataaaaaaagaggtaaatcactatgtactttatatccacaagaaggttattttaaagctttggttattgtaagtgaaagcaatagagtagaggttgatttatttattaatacttgttgtgattatatcaaaaaaatatataatgaggtaaacttttttaatggaagtaaatggctaatgattcaagtagatagtttattggtattaaacgatatgcttgaactaattaaatttagagcttaacatatagaacaggatgaatatataagtcatcctgtttttatattcaatcagataaattaatatatagtctataatatgaataatttagtaaatttactttatctttctacattctttgcaactaagtccacatgtgtttttttcttgcatattagtagcaccccaattagcaaattgttgtaaaataggcacaatacttttacctttacttgttaatgtatactcaacttttggaggaatttcattatattgtttacgatgaacaataccagtagactctaaatcttttaatgattgagctagcatagtatttgtaatgccatccaattttctttttatgctactatatctaattggattttcaactgctaacatacatataataggtaatttccacttaccaccgacaatgtctaatgcataacggattggacaggttaattcttcaacgtttttagttatatttttttcagtatttatactcattttaattactccttagttatagtagtatcttttttatactttatcagaaaaaactgcatacttgttttttctgtattttatattaaaattatatcaaaggataatccttaatacaagtatttaaaaggggtgtaagaattatgaaagcattagaatttttgaacaaggcaggagtttattatttagcaacagttgatgagaacaatcaagcacatgtgcgtcctttaggatttgttatggaatacaatggtaaacttacattttgcacatctaatcaaaaggatatgtttaagcaacttatttttaatccaaaggttgaactttgttgtatagaccaaaaccttaatactctacgtattttaggtgaagcagtatttgttacatcaaaagaaacacaagctaaggcacttgaaataatgccaagtttaggtcagatgtactctgtgggagatggtaagtttgaaatattctctattgataaggcaaaagttagttgttgttcaatgagtggtaaaaagattgatgtagagctttaattataattgaatcgacatccatagtgaaaattaagaaaacgttattactgaaatattgatagatttaatttaagtgcaataaaaagatttttaaataatgaatatgtaaaaatttttagttattagatgtgtatttcaataatgatatactattttgaataattacatactagaaataagataattaaaatttactttataatgggatagatttcttttaaaaaatattttaactataattgatttttatttaatctgaaaaaaatattatgactataaaaaattgctacttattatttggatatttttgtatataaataataagtagcatgactttatacattaataatgatagaatataaattaatagataagatataattttaaaaggagtgatataatatgagtaaatatagttctttatgggaatatgttaagaaaaataatagtcaatcgtttaaattaacttttgaagaaataaaagatattgctggaatagagatagaccattcgtttttgaaatataaaaaagaattaaatgaatatggatatcaagtaggaaaaatctctttaaaagagaagactgttattttcaataaaattgattaagatataaataattacatataataaaataatttgtattgacgattattacaaataaaaataaagtaaatcttatataagatttactttatttttagatgatatttttttagctttatactataaggtatataaaactaagcctattaaaaatgttataatttctattaccatcatagaccatatcaatccatcaagttcataaaagtaattaagctttattaaatagcttctttattataatttctttatttcatataatataaatagtattaaaatttttatgggagttaaagtaagcatgtattattacttagatatttgtataatcaacatctagtaatttacctttttggtgaaaatgattaataagttttttaggataattcattattaattcatctggaaaattaatttcctttaagatattctcagaatactcatagttacctatgtcaaaacaaatgtgagcatctgaagttagtatgattttagcaccatattttttgcaaagtgtagcaatatacttacagttatccgagctaccatttcttgacacgcctttaatagaacaattatttatttctattaagatattcttttctatagctaatttaatgattaattcatagtcgattgggtagtttgggtttccaaggtgtcctaatatttcaatattatcatgcttatttattgcatttattaaagctttagtattattctctaatgtatttggagaaaaaacagcttcgtgaaatgacaagataagataatctaaccgaggaattacaaaaggctctaggtctatgtttcctttaatatctagtatatttgcttcacagcctcttaaaattataatgttatttatgattcttgggatattttgaatgttgtgaaagtaccatctgtggggagaaccaggcatcttaggaccatgttcagatgtacctagtatcttaattccattttctttacaataattaatattttctagtaaagtgctatagccatgaccactgactatagagtgggtgtgtaaatctgataaaaaattcatataaattcctcctctataaaagatgagggtaacgtaatttatattataaaacgaataggaaagaaaatcaatagttacataattagacaaaaatattaaaatattgtagaattaagcttaataataaatgtttaacagtattactgcttataggggaggttaactatgacacaaaagaagctatcaaggaaagaaaaagttttaatttgcttgaaaaggttaacagaagaacacttgaactttaataatggcattagatttggatttgatgcagaatatatagctactgaagtaggtataaatagaagtaatgctagtaaggaattaaatcaattaataaaagaaagtattattataaagataaagggtaagcctgttcagtacttatataaagaaagtattgagagtattttgggaaagaaactaaataaagggatatttgataatattaactctataaacgaatatagtgaaaatgattctatcaaagatgagtatattttagagagtataaaaaaagagaacaatatttttaatttagtaggatgtgatggaagtttaaggtcccaaatagaacaggctaaagcagcagtaatatatccacctaaggggttgagtacattaataataggacctacaggagttggtaaatctatatttgcagaatatatgtataagtatagtttaactataaaagaagatagtgataatgcaccatttatcatatttaactgtgctgattattctgataatcagcaattattattagcgcagctttttggatatgtaaaaggagcatttactggagctgataaagataagtatggtattgtacatgaagctaataatggagtattgtttttagatgaagttcatagattatctgcagagggacaagaaatgctatttctgcttatggataaagggatatatagaaggttaggagaggctaataaggtacacgagtgtagagttatgataattgcagccactacagaagacccagaaacagcaatgttggaaacgtttttaagaagaatacctgtaactataaagattccgtctttagaggaaagaggctttcaagagagaatgaagcttatatgttatttttttaaagaagagagtgttaggattggtgttaagttaaaggtttcaaaagaagttattaaggcatttattttatataagtgtaagggaaacataggccaattaaaaagcgatatacaattaatttgtgcaagagcttttttagattatatgacctataaaagggaatgtgtatatgtaaggctctctcttctaccaaataatattagagaatcattatatggaaataatagaaaagaggagtttgtacaaaatttcagttttattggaaaagatgatattatttttttaccagaagaaaaggattttgaaagtgaaaatttattaatagaaaataaaaaatatgatttagatttttatggaatgataaaagaaacttggaataaacttcaacaagaaggtattaaagagtcacaaattagaagtgttatagatggagacatacagaagtattcctataatttaatgaatacttttatatataataatagtaatcaaacagcttataacaacattgttaatgattcaattgcaactactgtaaaatatattttacaaaagcatgataaatggagcaaaagagaaggattagataaattaataaaagctatagccttacatattcagaatttaattgaaagaataaagattggaaatatagtaaagcatcctaataaagatgaaattatgaaggaaagagcatatgaatataacatagcaaaagaaatattatctaacatgtcattaatgtatggagtagagtttccagaagatgaagcaatttttttagcaacatttctttatttatcgtatgtgggattaaatgaggagagtatagcaatattagtcataatgcatggtgaatctacagcatctagcatggtgaatgtagccaatactttactggattgtaaccatgcagtggcaattaatatgggattagaagatagagttcaggatattttagtacaagctgtagaaatagccaataaaattgataaaggaaagggaattttaattttaactgatatggggtctattttaacatttgctaaagttattcgtgatgctacaggaaaagaagtaaaagcagtagatatggtaagtacacctattgtaatagaagcaactagaaaggctctaactccagaaatgacattagagaaattatattttaatattatagaatctataaagaaacattatggagatatggaagttacatatgctgaaaaagataatggtggtagatattttgatagactactaattgataatattagtaaaactttgacttttttaaatggggaaaaggcttattttatattaaaagaagtaattaatagaattagtgaacactattctttagtaattcaagatgaacttttagtaaagtttatatttcattgttcatgtatgattgaaagagtaataataaaagagtctttagtttataaatcatatgaagaaagaattagtagaaataaagaattatatttagttataaaagaaagttttaagctagtagaagagacattcgatataattatttcagatatggaatatgcaaatatattagatatatttgaatcacaatatgatacagataaattcaaaagttgatacaaaatttaaaaatagccaaaaggctatcttttttttactttttttgatacagatttgatacaggttgaaaaaatcttttgatacatatcgaaataataagtttttaaaaaaaattgagtaaaaagttttgattaaatcctgtaaaatagccatttattattgatacacataagttggcacggcaattgcttatataaaaagtgacaagaaaagtgaggtgaaattggtgataggaataatagttatgactcatgggagttttagtgaagaaattataaaaagctgtgaacttattgcaggaccagcagaaagaacagcagcaattaaactaaataggaatgataatattgaagacttaaataaaaattttgtagaaaagttaaatgaattagatgaaggtgacggagttttagtattagctgacctattaggaggttcgccaagtaatgttgcaagtttaaaccttaaaaaaggtggcaagtttcatgcacttactggagtaaatcttccaatgctacttgaagctttaattaatagagagggaaaaagtttagaagagttagcagaagcatgtattgaagcaggacaaactggtataaacaatattaataaagttcttagctcaatgtaatagaaaaaggagtttgattaaaaatgtctttagtaaaatattgcagatgtgatgatagattaatacatggtcaagtgatatataaatgggttaagcatctaggtgtaaaaaagatagtagtagtagatgatgaaacaaccaatgatgttattgctaaaggtttgataaaaatggcagcaccaaagaatattgatttatcaatattaactgtaagtgaatcaaggagatatttttataataatcaagctgatgataacgtttttgtattaattaaaaatttagatactgcaaatagaatgatagaagaagggattaatatcaaaaaacttattgttggaagaatacctacaggaataggaaaaaagaaaatatctcaaaatgtatacattaataaaaaagagtttcttttaatagatgaatttattaaaaagaatattaatgtatcaattcaaatggtacctgatgaagaagaagtagaattaaaccaaaatattaatcgctataaaggagagtttatttagcaatgaataaatataaggtaattatactgtgccatggaacttggggaaaagtcttagtagaagaaacaaataaaaactttggattgtcaaatcaatatgaagttttatcactaagttctgaaaaagatgtttctgtatttatgaaagaggttgaagaagtagtagataaagaagatgtgaaaattataatatcagatttatatggaggatctacatcaagtgttgcaatagctgttgctataagaagaggaatagatgcaataaatggacttagcttacagacaattttaatcgtagatgaagaattaagcaaagaagataaattacatacattaccagaaagaatcgtcaaaaaaaataataacctttgtgtggatttaattaaagaatttaaaaaaatataaattatgaggtgaatataatggcaaaaataacattagtaagagtagaccacagattaattcatgggcaagttataacaaaatgggtaaaaatcgctcaagctcaaaaaataataatagttgatgacttcttaggtcaagatgaatttatggctgacatatataaaatggcagcaccatcaggagtagaagtagttattttaacagcagaagatgcgggacaagcattccaaaacaacactttaggagataaaaatatatttattctatttaaaaatgttgatatggcaaataaggcttataaagctggacttaaatatgaaaagattcaattaggaggtattccaaatgaagcaggaaagaaaatggtgtttacagctgtttcattaggaaatgaggatgtagaacaacttaatgaacttaatgaaaatggggttgaaatagtcctacaagttataccagaggaatcatctatgacatatgaaaatgcgttaaagaaatttaaataaaaaatataaattaggaggaattataaatggaatctgttttgatgttggcaattgtaacaggattatggtattggtttgcagcaggtcttgcagggtatacccttttctcaacactaaagtctcctttatttataggttttagccttggattactttggggtgatgtaacaactggtatgattgttggtgcaagtatagaaatggtttatctaggaatggtcgcagcagggggaaatattccatcagataaatgtctagctgctcttattgcaataccagtagcacttcaaactggtgttaatgcagaagttgcagtatctattgcggtacctttaggtgttataggagtattagttaataacttaagaagaactggtaatgctgtattggttcataaggcagataagtatgctgaagaaggtaatacaaaaggcatctggagatgtgcaacactttattctttaatatttgggtttgttttaagatttccaatagtttttgtatgtaacttttttggagcagatttagttcaatcattattagatgttataccacaatggttaatgaatggattaacagtaatgggcggtatattacctgcattaggttttgcaacaacaatatttactataggtaaaaataaattcttaccaatgtttattataggattttttatggttcaatattttgaaatatcaattactgcagctgcaatatttggtgtttgtatagctcttttaattacctttatgaaagaagacaaaagggtaggtgaagtataatgcaagaaataaaaaataaagaagttaaaaatggacaaggtccaactgaagttaataagacaagagtactcacaaagaaagatgtaacaaaaacatacctaagatggtggtggacagcagagttatctaattcttttgaaagaatgcaagcattagcagtttgtgcaagtttcactccggctttagaaaagttatataagaaaaaagaagatttagtagatgcattaaagagacacttacaattttttaatactcaagctatatggggaggattaattcatggtacagttttagctatggaagaagagaaagctactgaaggaaaaatcccaggagaagttatttcaggtgttaagaatggtcttatgggacctttggctggaattggagatactttagattttggtacatttcaaacaatattcttagctttaggtgcttcatttggagcagaaggaagtgttataggtgcatttttcccaataatgtttagtatattactattttgcgaaggttattacttatttcatttaggatattctttaggtagagattcaattaagaaaattctatcaggtggtattgtcaataagataattgatggtgcttcaattctaggaatgtttatgatgggagcattatctgcaactacagttaagctttcaactccgctatcatttgatattggtggtaaagcaattgttgttcaagatacattaaatatgattgctccaggtttattaccacttggtgttgtattcttcgtatattggggaatgaaatacaagaagtggacaataactaagttattagtaattttagttgtattagcattggtaggatcattcattggaatattctaattcacagtgattaaaatatagaatttaattttaggaggagaaagaaatgtcagaaaaaatgtatacagaaaaggaatatttagaaggaattagaggagcaacaggagaaagagcagtatggttctatcttcttatgaaagaagctgaaaaattaggagctaatccagatgatatatgtaaagaagcaatatatggatttggtaaaatgagaggtcaaaaatataacgtagcagatactccaggaaaaatggcagaaatgttatataacagtaaaggacaaaaagtgtttgaaatggaattagtagaaaatacagatgagaatggcgttttaaaattccatcactgtccattagatgctgcttggaaagaatatggattaactaaagaagaaagaaaagaaatttgtagattagcttgttatggggattatggaagagttgactgtgcacaaggtgttaaattagattttgctcaaaaatgtgctcatgatgatgaagtttgtgaattagtatttacaaaaaaataatttttaatgctaaaagcctgttctttaaggacaggctttaaaaagatagaaagtaggttgatttatggatataagcagaagtgtagataatagtttaaatagaaccatagaatttctaaaagaattgataaaaattgattcacaacaaggtgaacctatttcacaatgtccttttggtataggacctaaaaaatctttagataaaactttagattactgtgctagtttaggttttagtgttaaaaatattgataattatattggatatgcagaaattggagagggagaggaattaatagggattccaatgcatttagatatagttccaccaggagaggggtggagtgtagacccattttcgggagcagtaattgacaatattatttatggaagaggtgtcatagataataagggtgctgtatctatgcttatacatgtattgaaaaacatagaggatatgtatcctacaattaataaaagaataagattaatttttggtacaaatgaggagacagatatgaaatgtatcaaatattacttagataaaggtgaagaaattccaagtatgggatttactccagatgctatgtatccagtggttaatggagaaaaaggaagggttcatataaggatagaaaaagaaattaaaattgacaaaagtaaaccttacataatagtaaggggaggaactaaagaaaatgttgttccatctcattgtactgcaaaaattattaatggaattatttcagagttaactactaaaggagtagctgtacatgcaagtaatcctgaaaagggagaaaatgctatatctaaaatggtaataaagatagttgaggataatatggattttcagcatagagaagatatagaattagtttcaaaatacctttgtagtgattattatggagatgcattggggattaatcaatatgatgaggtattcaaaaacactaccttaaatttaggaatattaaaagtaaatgaggaaaaaatcgtatgtgagttagatataaggtatggtaaaaatatagttttaaataacataatagatagattcaaaaaggttttttgtaatggttggaaaatagaggttattgctcataaagacttacattatgtggatgagagtaatttagtacttaaaaaattattagaagcctatgaagaagtaacagatgaaaatggatatacaattgctatgggtggtggcacatatgcaagttggtttaaagatatggtggcgtttggacctaagttcttagcgtataaaactggtggtcatggagtagatgaaagagtaccaataaatcatatacgaaagaatatggagatatatactttggctttaataaaactattagaattgtaaaagaagaagagactttatgtgcaaatttacagatatcttaaaaagagagataaaacgagttcaactttatttaaatgttcaacaccatcaaatggggctgtctcaaaatagagataagcctcttgcttattattgaaatgatgaaaatatattttacttcatacaaaaaagagtgccttatgaagtaaaaagttaattttgagacaccctcatttgatgatgttgaagagaaaataagtatgaaattattaaaaaaagatgattttataaaagttaaggttgaaaataaaagttaattgaatggaattagataaatggagaaggctgtatactatctaataaaataacaaaagagtgttataaaactggttatatgattagagaaaagtctattgatacttatccagatagtggacggggatttatgacttgggatgaaaatggagaataataaaaattatagtttatacaatttaataagatatatgtacaagcagttaatctaaatgattgactgcttttcttttatagatttttatataatagacaattactaatacatgatagttgcctgttataattagaggaatagatacgaataataactttataaaagaattaaatggaaaattgaagagttatattcaggattttaaaaagaatatgaaatgagaaatgaaaataaggtgtttatattaaaagaggttttacacaaaatacttaaaaacgtgataaataaaaactgtatttagataaattaactactagttttatatataatatggattttgtttacaaagtttacatatttcacaaaatatttttaaaatatatttaaaaatatattttatatacttgttcgtttgtttctctgtggttgattttttcgtcaaaagtcaacttcaaatcgcttgttagctttacatgtttaaggatataattatacataaggagggattgacatgaatgaattaaacatcgcaaaaacgctgattttaaagcgtaaagaaaaaggaattacacaagatgaacttgcaaattatataggcgtttctaaagcttctgtatctaaatgggaaactggacaaagctatcctgacataacctttttaccgcaactcgcgacatatttcaacattaccgttgatgagttaatatgttatgaacctcaaatgatgaaggaagatattaataaactgtataataaactgtgcaaagactttacggttaaaccgtttgatgaagtcatggatgaaataagagaaatcataaaaaaatattattcatgttttcctttgatttttcggatgggtcttttaatagttaatcactatgatattgtagatgaaaaaaagcgtgaactattaattagtgaagcattagaaatatttattcgtatacaggaaacttgtaatgacatagatatttgccgtcaagcaaaaagtatggaggcaacttgttatatattgttaaatcaacccatacaagtgattgatttattgcaaaacagcaattttcccatgataaatgaatctatacttcttgcacaggggcaaatgatgaatggtcaaatggatgaagcaagagaaacatttcaacttggtgcatatcagaaccttatatcattagtccaaaatctagtgggtattttgcaaaatgcagataaattacaaatgaaggaaatagaaagacgtattctagcaatttcagatatatttgagcttgatacattatctcctgctattatgctttcttcatatttaacacagacacaaattaatttaatacatggggataatgaaggagctattaaatcattacgaaaatatgtagatttagcaacacgtgatatatacccaattataatacatggggatgacttttttaataaacttgacagatggatttctgaaattggaacaggtattacacgtgatgatacaatcgtaaaagcaggtattgttgctgctattaaaaataatccaatgttttctttattaagtgaaaacaaagaatacaaatttcttatagaaaaattatctttattggaggaataagattatggaaaatttgatggaatatttaccacttttgattcctgttattattttagatttaatacttataattactgcacttgttcatgtattgagacatccaaattataaaattggaaataaggcaatatggattattgtagtactgtttattagtctaataggaccaatcttgtattttacaataggaagaggtgaagaatgatgaatattgtctcaataaatggattatcaaaaggttttggtaatcgaaagataatagataatctaaattttactgtaccagaagggtcagtctttgggtttgtaggtaagaatggtgcaggtaagactacaacaatgaaaatggtacttgggttacttgaaccagatagtggaactatagatgtttgtggtgagaaagtgacatatggaagaacaagttctaatcgtcatgtaggttatctgcctgacgttccagagttttacaactatatgagaccacttgaatatctttctctttgtggtgaaattacggggctttcaaaaaaagaaataaagataaggagtgaagagttgttatcacttgtggggcttggcaatgaaaagagacgaataggtgggttttctcgtggaatgaagcaacgacttggtatagctcaagctttgctttcacgtcccaaattacttatttgtgatgaaccaacaagtgcacttgaccctgttggtcgaaaagaaatattagatattatgcttaaaatcaaagactcaacaactgtaatattttcaacacatatactatcagatgttgaaagaatctgtgaccatgttgctatactaaacaaaggaagcattgctcttagcggtacactttcagaaataaaaagtatgcacggaaaggatagacttttactggagtttgcaagtaataatgaaattcaaaagtttaagtctagtggtggcattaaatccttactaaaagattcagaagaaactaatatggaaattgttttgcatggtaaagatataaaagcaatacaaaaaacagttatatctacactcgcagaaatgaatctttgtccagtaaagatggaactaatagaattgtcacttgaaaatttgtttttggaggtagtaaagtgagagaatacatagcatttacaaaaaaagagtttaaggagaacataagaaattataaattacttagtttgactattttatttttagtatttggaataatgagtcctctttctgcaaaatttatgccagacttgattgctcattttgctccaactttaaaagttactactgcaccaactgctttagattcttggacacagttttctggaaatatttctggtcttggaacgagtttaactctaattgttttttgcaatattttatcaaacgaatattctaaaggaacactcgttattatgttgactaaagggttatcacgttcatctgtagtattgtctaaattttctattgcagtaattattatgacaattggtttttggttgagctttttatgtacttatggatatacaatgtatttttggccaactgcaaatcttaatcatattatattttcagcatttaacttatggttaattagtattatgtatatttccatattaattcttgggtgtgtactatttagaccagcatttgcaagtgtgttacttgtattagcagcaactgctattttgagtttgatttctattcctaaacagattgcaccttatacgcctaatttcatattatcaaaaaatatagatttagtttcaggtaaagtgacacctccagaatttattattccaatcattgtaacaattgttatttcgatagtatgtctgttattagctgttgttttgtttaataaaaaagcagtttaaggatatttttattataaatacaaatagtgctgtattgtgggaaaatgtgtttagtattgtagaagaatatatttaagtaaaaaagaggctgtctcaagatagagaaataagcctcttttttattttagtcctcctcactatactttataataattaagttattaccttaaggaactatctaaaaaaagagatatagattataatctaatgcttatcagttatttgaggtgtttagtatatagagtctaaagtagtgaaggactaaaataatattgttttcattaaataaagataagaatctttaattgtggtaaaatatactaaaaaatcattttaaaagtgataaaattattttaagtaaatattttaaaggggtgtagatatggaaaagtcaaaagtatatttttgtgatttatactcaaattcgcaaaataaaaacgtaccaaacaatgtaagaagattatttgatgaagcaggattcaaagatttaatagaaaagaatgaccaagtcgcaattaaacttcactttggagaaaagggaaatactacatatatgagtcctgtggcagttagacaagtggttgataaggttaaagactgcgaaggaaagccatttttaacagatacaaatacactgtatacagggagtagaacaaattctgtagaccatcttacaactgctatagaaaatggatttgcttatgcagttgtaaatgcaccagtaataattgcagatggattatatagtagaaattatgagaatgtaaaaatagacaaaaaacattttgaaagtgtaaaaataggtggagaaatttataattcttctgcaatgatagtaatgagtcattttaaaggtcatgaagcagcaggttttggaggagcattaaaaaacttagctatgggatgtgcaagtgcagcaggaaaacaaatgcaacattctgatgttactccagtagtaaaggaaaagaagtgtgtaggttgtggaaagtgtgttaattcttgtcctacaaaagctataagtatagtggataaaaaagcagttatagattctgatgtatgttatggatgtggagaatgtccaactgtctgtccaactagagcagtaactatacaatgggaaagtgactcagatgtgtttgtcgaaaagatggcagaatacgcttatggagcagtatcaaataaaaaagacaaggtagggtatataacttttgttatgaatgtaactccactttgtgattgtgtaccttggtcaggtagaccaattgcccatgatataggaatattagcatcaacagaccctgtagctattgaacaagcatgctatgatttgatttgtaaggaaatgggtcatgatgttttcaaacatgaacatcctcatgtaaatggaactagaataatagactatgcatgtgaaatgggtatgggaagtaaagaatatgaattaataaaattataagaatagtagcacttaaatgcatataattattgtaagagaaatctaaaagtatcaaaggagtatgcatttatgaaaatttactatgagaaggaaaacagcaagaaggctaatgtaaacaatattccaagtgtatttgcgtttaattttctaagaaactttttgactagcaaagagtatgaggaaactagaaaagaatattttataaataatctaacaaaaagtcaggttaatcaagccatgaaggatttaaaatggctatttagagaatatgaaggcttagaggttattacaatggaaagcttggatggagttaagacaaggatagttttataaaccagtaagaattatattctaataaaaaatactgctttaataataatatgtataatctatatactaatattattttgaagcagtatttttttgtgtatagtaaacttgtgtctaaaataaagttgaccaataaatgttatatatgcaatactatatataataagtaaactacataaaaatattaagttgacaaataggaggatatatggaaaaatacataataaaattaaaaaataaagtattgagagaaaaagaaataagttatgaagaagctcttaatttaataagccttgatacaaataataaaaacgattttgatattctattaaaatctgcaaatgaaataagagaatattttatgggaagaaaagcagatttatgtacgataatgaatgctaaatctggcaaatgtagtgaagactgtaaattttgtgctcaatcatctcattataaaactggtgtagaagaatattcattattagattacaatgaaatcttaaatagagctaaagagatggagagtaaaggagtgcatagattctcattggttacaagtggtaaaggtatgtcaggaaaggagtttaataatattttaaatatctatgaaggattgagggaaaatactaatttaaaattatgtgcatctttaggtattatagattatgagcaagctaaaatgttgaagtcagcaggtgtgactacatatcaccacaatgttgagacgtgtagagataattttcataatatatgtacaacacacacatataaagataggataaaaactataaaagatgctaaaaaagctgggctagatgtatgtgtaggcggtataattggaatgaatgagagtgaagaacagagactaaaaatggtttttgaaatacgagaattaaatgtaaaatcatttccaataaacattttaaatcctattaagaatacgccaatggaaaattatgatgtattagaaccaatggaaatactaaaaacaacagcagtatttaggtttataattcctaatgtgtacataaggtatgctggtggaaggctatcattaaagggatatgacaaagttggatttaatgggggagtaaattctgcaattgttggtgattatttgacaactgttggaagtgggattgaaaatgataaaaaaatgattatagagcaaggatttgaactttaataaatactacttaaattaattaatatacttttagataattataaaagtatattaattttttttgcagattaatttaaatattaaaattgaattataagttgcaatattttgaaaaaagggaaaaatatcaaaatttatataaaatggttgcaaatgggaaaaggatgtgatagtatctaggtaaccggttaagtaaaacggtttcctaaattttgggggtgaacttcttgagtataactataaaagaaattggcgaattggctggtgtttctaaaacaactgtgtcaaaagtcattaataataaagatgaaaatataagtcaggcaacaagagaaaaaattttgaaaataatgaaggaaaaaaattatgtaccaaataaattagcacaaagtttagtaactaaaaaaactaatactatagggcttcttataccagatatacgaaatccattctttacagatgtatcaagaggtgtagaagacaaagctaatgaagaaggctacaatataattttatgtaatacagatgaagatgctaaaaaagaatatgaaggaataagaacactatcagagaggatgatagatggaattatatttgcagcatcttcaaatacaaactggaaagaagcaaattataaagatataaaaataccaactgtcttgattgataagaagataagtatgaacaaagaaaccttaaaaggaattgttaaaataaataactttgaaggggcctatatagctacaaaacatttattagatattggaaataagaaaataatatacctaagtggtccacttcaaaatgaaatagcagtagatagattagaaggatataaaaaggctctaatcgagtgtaatttaagctacaattctgcttatgtatttgaaggaaaatataagattgaatggggacaagaatttataaaaaatttagaaaagatagattttgatgcaatattttgtgcaaatgatttgattgcaataggtgtcataagaggtcttaaagaaagagggttaagtataccaaatgatgtaagtgtcgtgggatttgatgatattcaaacatcaagtctaataagcccttctcttaccacagtaaaacagccgtcttatgatataggatataaagccagtgaaatattgataaattgtttaagaggagataaaaaagaatcatttgatgaattgattttcaaaccagaattagtcataagagattcaacaaaagaaagtgaataacagcacgagagacataaatagatatgtaaaggagtaatgtaatgggaaacatagttgtcataggaagtgtaaacatggacatggtatgttctgtagataaaagaccagaaaaaggagaaacagtattaggtaatagtttttttacatcacctggagggaaaggggctaatcaagctatctcagcttctaaactaggagcaaatgtaaaaatgatatcatgcataggggaagatggcttaggagaggagttaataagaaattttagaacgaataaagttgattatagtttagtatccagaaataatcacaaaagttctggtgttgctgttataacattatgtgaaaatgataatagtattgttgttgtaccagggacgaatgagctagtagatatagaattaattaaaaagaatgaagaagagataaagaatgcagatatagtattgctacaattagagattccattaaaaacaataaattatgtagtgaatttctgttttgaaaataggattaaggttttattaaatccagcaccagcagtaaaactaaatgaagatataatagaaaaagtaacttacttaacaccaaatgaacatgaatataagatagtttttgacacaaatgaagggatagaagaagtattaaaaaaatatccaaataaacttgtaataacagaaggaaaaaatggagctagattttatgatggtgaggaaatcaagcatgtatcttgtataagtgttgatgttcaagataccacaggagcaggagatacatttaatggagcattggcagtggctataacagaagggaaaaaattatatacagcagtagaatatgcagtagtagtatcaggtctttctgtaactaaactaggtgcacaatctggtatgccttataaagaagatgttgaaaaatatttaaataataaataaaaatctaatttgttcaaatttaaaactattaaaaatggaggttaattatgagagtgagaaaaattttatctttaggaattgctggaatactagcaataggaatgttaacagggtgttcaatggaaggaccaagtaaatcagataataaaggtggttcagacaagaaagatttaactattggagtatctacaataactcttcaacatcaattttttatagatattgatgagggaataaaagaaaaagctaaggaattaggtgtgaaagttatagtaaatgacccagaccaagatgtagctaagcaaacatcagcaatagaagattttatacaacaaaatgtagatggaatgatagtacttggaactgataattcggctatagtaccagcagtagaaggagcatttgaaaaaatgccagtagttacagtagatgctgtattaaatactgaaaatattacaagttatgtaggaacagttagttatgatgctggtaaaaaattaggggaatacactaaaaaatacatagatgaaaagttaggtggaaagtcagaaatagcaatagtgacagatttaaaatctcaaatacaaatgcagagaatagatggatttaaagatgcgttaaaaggttcagcaaatgttaagatattaaattcacaaccaggatatgacagagaagaatctcttaatacagtagaaaacttaattcaatctaatccagatgtagatataatatatgcaacagctgaaaatagtgtactaggagctaaagctgcacttgaatctgcaaaaaataaggatgttaagattgtaggatttgacttaactgaagaagcatcaagtggaataacagatggaactattcttgctatgattcaacaacaacctaaagagatgggacgtttagctgtagaagcagtagtaaaagctataaaaggggaaaaggtagaaaagaatataccagtaccagctttactttatgataaggaaaatataaaagactttaagaattagtaaaataaaatgagattatttgaaagaaatcctatttaaaaaggagtgtcattatgagtaatataattctgaagttaagtaatattgctaaagaatttcctggtgtcagagcattagataatgttaattttgagttatttcatggcgaagttcatgcactactgggtgaaaatggtgctggtaaatcaacaatgataaagattttaactggtgcacattcgaaaacttctggaaaatttatttttgaaggcaaagaaatagagaatatatccccagatatctctaaaaagataggtataaatgccatatatcaagaactaacagtttttgacgaattaacagtagcacaaaatatttttatgggaaaagaaataaatggcaaagtcttaaccaatgacaaaaaaatgaatgaagaggctaaaaagattttcgataatatgggaatagatataaatccaaatagtttagtcaaagagcttagtatagctcaaaaacaaatggtagaaatagcaagagttttatcatcagaaactaaagtattaataatggatgaacctacttcttcaataagtaaaaaagagactgaaatactttttagacttataaatgatttaaaagagagtggagttagtataatatatatatcccataggatggaagaactctttgagatttgtgacagaataactataatgcgagatgggaaaacgatttcgactttgaataccaaagatgtatcgtctgaggaagaattagttaatttaatgatagatagaaagctagaccaatttttcccaaaaagaaaagtagaaataaaagaagaaattatgcgagtggaaaatctaactaagaacaatgtttttaatgatattagctttaatataagaaaaggtgaaatattgggaataggtggactagttggaagtaagagaagtgaaatagtagaagctatatttggacttagaacatatgattctgggaaaatatatttaaacaatgaagaagtaaagtttaaaactccatcagatgcaatagaaaatggactgggattaataacagaagatagaaaaggtactggattgtttttacaaatgagtgtcaaagaaaacacaactatggctgggttaaaaaagatatctaagtttaaatcaattatagatagaaaaaaggaaaaagagattttagaaaaatacatagaagctttaaagataaaaacaccacatatgaatcaagttatacaaagtttaagtggtggaaaccaacaaaaagctataatagcaagatggcttttattacaaccagatatattgattatggatgaaccaaccagaggtatagatgtaaatgctaaggcagagatatacaatctaatgggagatttagtggagagtggtgtaagtataataatgatatcttctgaaataccagaattaatatcaatgagtgacagaataatggttatgagagaaggtcatataagtggatttttagaaggtgaagaaatggttgaaaataatgtattaaaattggctttcggaggtaaaattaatgagttcaataactaagcataaagaagaaaaatcttctccattattgacaaaattaacaagtgtatttagagaccaagggagtgcagctgtaggacttgtaataatttttataataatgagtgtagcttcatctaactttttaactttagataatttaattaatgttggaagacaaatatcaataaatgcaatacttgcagtaggtatgacatttgtaataattacaggaggaatagatttaagtgtaggagcagtaattgctttagtaggtacattttgggctacaacagtagtgaattataatgcacctatatgggtaggtatgatacttgcattagcaatagggacaatattaggagtcataaaaggtgcaattatttcaacacaaaaactacctccattcattgtaactttagccatgttaacgataataagtggggcaagctttgtatttacaggaggaagacctatatcagtaaatacagatgcatttaagatgctcggtagaggatatattggaccaataccaataccagttataattatgattatagttgtaatagcaggacattttctattaaaaagaactaattttggacgtcatgtacatgcagtaggtggaaatgaagaggccgctagattatgtggagtaaaagtaaataaagttatagtaaaagtatacgcactagctggactactaacagcattagctgggataatactatcatcacgtttggcatcaggttcaccaactgttggagatggagcagaattggatgctatagcagccgttgtgcttggtggtactaatatgatgggtggttctggttctatagtaggtacatgtataggtgtcggaataataggaatattaggaaatggattaaacttattaagtgtatcttcatataatcaaatgattataaaaggtttggtaatgttatttgctatatggataaataatataaaattaaaaaaatcagctaaatctaaatagtaattaaattttagcttataaactataaaaattattaagtttttgtatatatttttatactttaatttgcatacatctttatacattgaatgggaatatgctaagtgaaaaagtttactatggcttaaatagatgagattagacttgaaattttaaatgtaaaaataaatcttaggaggaaatatgaaaaaaattctcttagatacattaaatagtaaaaaacaagaatacatagattatttaaaagaacttgtaagtataaagactgaagatgttggtcatggaatactaggtggatttgaaaaagaaggacaggaatatattgaaaaacttgcaaattacataggttttagtgtagatagacaagaaatgagcgaagaattaattaaaaaagcaaaaaatatatataaagaaggaaatctaggtcacaattatcaagatagatataatttaatttgtaagtatagtgatgatttacctggtaagacaattgtatttaatggtcatgtagacactatgccaccaggtgatataagtaagtggaaatataatccatatcgtgctacagaagataatggaaaactttatggtcttggaactgctgatatgaaatctggacttatagcatcaatattagctgtaaagcttataaaagatagtggtctaaatgtacctggtaatgtaaaaataatgtcagtagtagatgaagaaggtggcggaaatggtaccataaatgcagttatgaatggtattggtggagattgttgcataatttgtgaaccatcagaacaaaacttaatagttgcacatatgggatttgtattctttgaagttgaggttaaaggtgtgtctcttcactgtggtagtaagtgggagggtgtaaatgcaattgagaaggctatgttgttgcttcaagatataaaagagttggaacataactggcttatgatatataagcatccactattaccttcacctacaataaatttaggtgtaataaatggtggaacagcaggttctactgtgccagataagtgtgtatttaatttatgtgtacacttcttgccaaatataatgagttatgaacaagttgtaaatgatgtaacaaatgtcataatgacaagggctaatggagatttatggcttaaagataataaaccaaatataaacatatatcaatcagggttaggttttcagatggacaaggattctgattttgtagtgaatgcacataaaatactagaagaaactttaggaaaaaaattagagataaaaggttcaacagctggcaatgatgcgagattaatgaaaaatttagctgaaataccaacacttatattagggccaggttcaatagaacaatgtcattcaattgatgaatatgttgaaattaaggagtatttagatagtatacttatgtatgcaagtctaatattaaacttataaaagtaggaggaatatataaatgaaaaaagtattaatagtaggggaatcttgggtaaaaaatataactcatataaaaggatttgatacgtttgttacaactcattatgaagaagctgtaaagtggttgaaagaagcaatagaatctggaggatatgagacagttcatatgcctgcacatgtagcagcagatagttttccgtataaattagaagagttaaatgagtatgactgtataatattatctgatataggttctaatacgttcttattatctaatagtacttttatagattgcaatagtaatccagatagacttgaactaatcaaagagtatgtaaataatggtggggcgttaatcatggtaggtggatatatgtcatttacaggaatagatgcaaaagctagatttggagaaactgctatcaaagatgtattaccaataacaatgatagataaagatgatagagttgaaaaaccagcaggaataattccagaagttattgactctgaacatccagtattaaaaggtataccaacagaatggccaaagtttttaggatataacaaaacagtagctagagataattgtcctgttttagcaactattggaggagacccatttgtagctgttggcgagtttggaaaaggaaaatctgctatctttagttctgactgtgcacctcactggggtccaaaagaatttactgattggaaatactataataaattatgggttaatatgcttgattggttaacatgctaaaaattttataaaacttgaaaacctcttacttgataaaatgaaacttacaagtcaagaggttttattgtataaaatggttgtatggtagaaaatatttttaaatcagttaaaattagtcattttggctgataatcgataagttattagaaacagggaggtttatataattaatatggataatttaaataaaaagtttttgatggaatatatagatgagatacagggagaattaagagatatatcagataagatatggaaaaatccagaacttcagtataaagaatactatgcttcaaatttacaaaaagaatgtttaaaaaaacatggttttagtatagagggattagaaggtatggatacagcatttgtggctagttatggagaaggtagaccagttatagcagttttgggagaatatgatgctttagatggtttgtctcaaaaagtatccactactaaagaacctattgtagatggtggtgcaggtcatggatgtggacataacttacttggtacaggttcaataggagctgtaattgcagtaaaggaattaatcaaactaaaaaagctgaaagggactataaaatactatggatgtccagcagaagaagatttatctggaaaagtattgatgataaaaaaaggtttttttgatggaattgattgtgcttttagttggcatccatttgatataaatactccgataagaatcccaacacttgctaattactctgtgaaatttagatataatgggattagtgctcatgcagcacaagctccttataacggaagaagtgcacttgatgcagtagaacttatgaatataggttgtaattatttgagagaacatatatttgataattgtagagtacactatgtaactactaatggtggaaaaatgccaaatatagttcctgattttgcagaagtgtggtattacataagaggagttaaaatggagcatgtaagagatgtatttggtaggattgttgatatagcaaaaggagcagcattaatgactggtactattatggaatatgacattataagtggagtatatgactatattccaaatacaatattaacagatattctatcacaaaatatgaaattagtaggtgtgcaaaactataatgaagatgactactattttgcagataaattagctgagacagtgtctatagataaaagaagtagtgtttctagtgtattaagtggaaataaggatattactaagatgaatttacatgatgaggttacagatgatacatttactcataataactgtatatcattatcattggatattggagatgttagctacataattcctacagcacaatgttcttgttcagtttggcctattggtatttctgcccatacatggcaatcttgtgccagtgcaggttctgatatgggatttaaggcaatgttattggcatctaaatctatatcatgttcaataaatgatgtaatgcttgatgaattggttataaataaagcaaaaaaagaattgaaggatactgtaggtagttttgaatatactccaattatttgaagagtaatttaatacaagtaagattgaattgtatgaattaggatgaatatataaattaatattatttttaacttaactttctaattattttcaatctaagatacaataattagaatatatttttaaagtttcctatttaaggaaaataatttgattttatgtttgataaaaggacttataatttgtaagcccttttattatatttattttttgtttataattaattttattttttaggtttagttaggttatagattaccctgaaaaataacatttaacttattattaaaaacatgtaagaatagtttataaatattttattttcgatgttgtttattatatccattttatcgatggatgaggaatggctctgccttccctagttacagatgtagtagggaaaccaattgcacaggcatcaaatccatattcacctgttggtactcctaaaatatcacaaaaatctttattatcgctcaatcttcctattacactaacaagttcaaaacctaatcctaaagcagttgatttaagccacatattctgcatcacatgagataatgacttttgttctataggtggtattccacgacgttctgccacaataataagataaggtgctgttcctataccaagaacccctttttcaacttgcatttttaaggaagtaatgaaggattgaagggtaatgttgttctttgccttcttctcattgactgatatttgagttttaataacatcaacaagaatggtttttattttattcatttgtaaactgttatttgaaataacaaagaaatgtctgaaatctgtttgttttgctactgaaagtattgcataaggtgcaagtcttccagtttcaattatttcttcaatcagcccttttgaaggtacttcttttgtaaaacttcttatggatcttctagttcttaatagcatatccaaaacttcattaacattgtttttatctaaattgttcatttttatcctccactaatagtattcttaagatgttctataatgcatccatataaaggcgaacttttcggtcatattaaacatttccttcaaattaagtcgctatttctatgaacacaatgttgattaataatctatatgtatattataatatttatattgcattatgcaataaacaataatatttaaactgttaagtaataaacatttactataaaattgttaattaaaattaaaaaaatttatatggaatgaggaaataattcatgaaaaaagtatctattgatagaagaactatacgtactaaaaaaatgattaggtctgcattagcagagttaatagatgagaaaggatttaacaatatatcagttactgatttaactcaaagggcagatataaatagaggaaccttctatctgcattatgttgataagtatgacttgttagagaggattgaaaatgaaataatacaggaaattgaagaggagaccaaacatcttgattcatccaacatgatggagatagatacctcaagtgaacctcttccatttatggtaaagctttttgaatattttagaaaaaattcagtaattattaaatctatcttgggtcccaaaggtgaccctacttttgaaagaaaaataaaaaaatttattgaaaccaatttgtttgagaaacaaaaactaataaattttaacatagatgaggcaataatttcagaagaatattttatacaatatatactttcagcagacttaggtgtaattcaatattggcttgaaaaaaatatgaaagagtcccctgaagaaatggcactgatacttgctagaatgtcgttactcggtccgttaagagcagtgggaattcgtaaagattcataaaaatagttttatatatattagactttgaaaatatatgtttaaaaaccattttttactactactgtttataaattaggggagatatcttaaaatattagtaaaaggagtgctaagtgagtgtaataactatgagataagaggtttagttgatatagtcaaaacttcaaaagaatcaattagaaaagttaaaatattgcaattaaatttaaaggagtaatatatgaaaaatgaaaatataagttatttggcgttaggattatgttttggtgttgttttgggttcattatttaaaaacttagctattggtttatcctttggattagttattggagtagtattagacagtaagaaaaataaataaaacttcaatagtaacatataacaattatactatttttgtataaaatcattggaaatcaacaatagaaaatatttgttatttaaaaactaaaaatacagtttaaacgacctaaaaatatattatataattattataacaagataagtgagagtaaggttatgataatagagtaatatttttcaattattactctatttatatttatttagttatactatagtttatattgttattttattttcatatgcagtatagggaatggattaccttgttcatcgaactcagattttttaaagactttaaatcccatatgtttataaaagcctaatgcttgttgattttgctcattcacatctacataatttacatttaatacttctattgcatattctacaagtctttttccaattccatttcctatactataattacttacaaataacatttcaattttaaaatcatgtattcccataaaagcttttataatacctttttttgtctcttacacataaaaaattactaacatatttagcacattctttaacttgaggctttattgatattatattttcttcacttaaaaagtcatgtgttgctcttactgatgattcccgtgtatctagtatttctttcatatctttattgttaataatatttaaattttcaatttttatcatttaataattcctcttaagtaagtatgttacttaatattatatgttaaatatgatttaaaaaggttataagaatatttttgtattaaatataatcaaataaatatatttatttgtcataaattaaatgtccactaaaatagaaaaaataagaagaaataggtaataaatgatagcttatagcaaaataaagatgtaagtataacaatagatgagattggaattaagtcactatacctaacagaacattcttaggcgaatatagaagacttaaaaaagaaaagagaagtagacaagaatttattaatgattacatataaaataaatgaattataattttattaatgatataataataattaacaaaaaataaaagaggaacgagttaatgtttgatggcatacactcattttctaaccaataaaacaatagattcaattaaggttactaaagtctaatcaacacataaacatataggataaatacatctttttaatatattaattatgttagacttacaaaaaatgtaaatacatagcttgttaaatcttgattgaaccttaagtaataagggataaaaaatgacttgttcaaaggcaaagaatatactattaaatgatataagtaacttagagataatatgtagtaagtcaaaagaactatatagcatcagtaagtaaaaagcgtaaaaacttacataatgcactataaaataaatgagttagaaaataaatataatttatataataaagtagtacaaaaaggagtatttatgtttggatatgttaaaataaacaaaatggatttaacatttagagaatatgattattacaaagcttactattgtggactatgtaaatacttaaaaagaaatcatggagaaatctctaggttttctttgaattatgatataacatttttaattgttttattaacagcagtatataacccagagtctataagtacagaggaagtgtgtatagtaaatccatttaaaaagaaaaaggtaattacaaatgatattacagaatatgcagcaagtatgaatattcttttaacgtattataaattggaagataatttaatggatgataaacgcataaaagataaattggcatattatatatataaaaacaaattaaaattagcatatgaaaagtatcctgaaaaagcagagtatataaaacaacaactaaatgaattaaataagttagaaaaagataaaaatataaatatagatgaagtatctagtatatttggaaatataatgggtgaagtatttgtctataaaaaagatgaaaatgagagaaacttaagaatgataggttttaatataggtaagtatatatatctactagatgcctatgaagatttagatgaagattttaagaaaggaagatataatccatttatagagtatattgataaaaatgatgagttaaaagaaaaagtaaaaaaaataatagtaacatcattaggatttttagctaggggaattgataatctaaatctaaataaaaatgttggaataatagaaaatataatttattctggtgtttatttaagatatattaatatattagaaagtagaggtggaaagaatgtacagtaatacttataataatgaaaattttatgagagcaagagcattcatagaaaatagtgaatttaaaaaagcatatgattttttaaaaactttgactgacaaatgtgcagagtggtattatttaactggcttttctgcaatgaacataggatattatgaagaaggtgaagacttcttaaaaagagcaaaatttatggagcctgaaaatagtgaatatagtgatgcacttagaagttatacacaatatagaaatgattatagcaatagggctgacaattataatagaagaagacgtaatgatttagatggatgttgttgctgttgctgtgatgattgctgttgttgtctaggtgacgattgttgtgaaaattgtgctaagctttggtgtttagattcatgttgtgaatgttttggtggagatttaataacttgttgttaggatgataaatatgagtataaaagttgcttatggaggagttttattagcattaaatgtgatattgttgactcttacaaatattattcctgtaaatacattgtttattatggggttagcatcacttttagtatcaattgtaataatggaatggggctttaagagtggaatcgctttttatataggttctatagttttaggatttatagtgatggcaagtaagtctcaatggattgtatattcacttacctttggaatatatggtattgtaaaatatcttatagaaaaagataggtctatatatattgagtattttatgaaattagtatttgcaaatataatgatacttatattgtattttttattaagaacaatagtttatattccaataaacatatttattataggttcatttgagatagcctttatagtatatgactatgtttacagttcttttataggttattacaataataggttaagaaagatgctatttaaaaaataatagttgatttttatatttaattttaatgaaattgtagtttggataagtgtaaatgatatatctgaatatacattaaagcataaagctaaatttaatatattcttagtgcaacatataaaagctttgatttttagtcaaagcttttatatgttagatataaatattagatataatataagtttttaaaatagatagtataaattaaatatccactatatttacatctgtagatagagaataaataatatcttttctttctactattatctcaacatttttagaaatttcctcatcaagtgatatttgagataaaagttcctttgttggatttattgctattggatttccaactctttttagcatatttatatcaccattagtatctccataggcatacgagtttgataaatctaaatcatactttacaacaaaatcatttatagcattattcttacttatagaatcccacattggaataactgtgcctgtaaatatattattttcaaagacataatcacttcctagaaaatcggttacattatatttttttgccattttttcaacaagaaatccagggctaccagatataaatataactatgtgtccttgatttagatgccactcaatccttgaacgtgtgtatttataaactctatctgcttttaatttaattacttggtcacttgtaaagttgatacaggttttatctaatccttttagtgaatcaacataaaggtcacatatttctaatagataatcatcataattaccttgtcttttatcccaatccataaaagtgtctctagcatgtttataccaatttttttggtcaattatatcgtatttaattaattttttaaaatgttcaaccataagagagtctctataaagagtaccatctatatcaaaaaaagctgctatatttttcataagaccacctcaattaatcatttccttatattatattataaattgtatctaagttgttaaaatatatgtataataatttatatattaaaaaacaagtattttagagtttaaaggatgtgactatatgaattttaattttgcaaaggctacaaattctagacttatgggcagtttaggtcttataataaattggatagatgatgaaaacaatcacttttgtcaatattttttattagatgcagagggattaggattagcagattatgtgagtttaaataacccaacacaagaagaagcttatatggaagaagaaagattgatgggaggatttggttcagatagagttgaattaacgaaggatgaatctttatttttagtatcttattttggtaataagaatctttattatgataagctattgccaggagataaatgtgagtatattgatattataaaaaactataaaacagatttaattatagaaaaattatacaataaaatatgtaaaagagttgatgaggaagttgaatttataaactatatgactatgagatttatagcatgggatagagaaagtttaaaatatttttctggaagtgacgagattgcaaatatgcatattactaatataaatggaacattacttaaaaacgtggtaagtgataaaggtcaaggcagatatataagtgaagctttatatgaagacaatgatggatattatatatgtaaaattgctttttgcataagtaagtgctatgaaactggttttagaattaattctctattagtgacagataaagaacttatgtatgattttgaggtatttgatgagatttctaaaagtgaatttgtaagtgtttacagtgtaaattcacctgaagaatttgcaggagtattttatagagaaaatccatttctgttaaaaagtaatatgaatgaaggtatattttttactagatttaattttaataatgaccatgtaaaagaaaatgtatatataataaacaatgatatgaaagctatatattacttaatgggaaataagttttttattggtacttataacgaaaatgattgcaattatatcaatgaaataagtcagtctaattatagtgactatattaaatttgaagagaaatttttctttgagcaaaatgcattatatgactttgcagaatcaggttcattagattttgatgattttttggaataataaatttagacattatttaagcgagattaactgaatttaatctcgcttaaatttatttctataatattgggggaatattatgaggaatacatttattattgtggtcaattattaaaattttatacagtttattataaaaaatttatacttttctttatgttgtttgccaatattagtctcaaatacgagtaccatactattctgacccaccaacacaagaaagagttttttaaatgaaaaagtcagataaaattaaattttatctgactttttctatgtttatcttattagattatgttaatatctgttgaccgaataagcgcatactcagtcaactttctatacctataataatattgggggaatattatgaggaatacatttattattatggtcaattattaatgttttatacaacttgctcaaaaaaatatatattacatttcttcctcatcaaattcttcaatattagtagcctgtggtataccttgtatagacatattactagaaccataaggagtaggatatatattaggaggcatagtactaggcataactacaggcataccttgcattgtattatgacatataactcctggtatcatcataagtacattaggaggcatattttgattacatgagaagttaggaatacccatagtattattcatattataccccatattactgttcatgttattaggcacattgttaggcatacccatgttactattcatattattaggcatattgttaggcatacccatgttactattcatattattaggcatattgttaggcatacccatgttactattcatgttattaggcatattgttaggcatacccatattactattcatattgttagacatattgttaggcatacccatgttactattcatgttattaggcatattgttaggcatacccatattactattcatattgttagacatattattaggcatacccgtattattattcatgttattaggcatattatttgtagcagatgtattgtaattcatatttccggatgtattatttgtgttaggcaagttgtttggagaattactacttttaggataatgatttacattattaggatataggttatttatgttctggttattaggtatttttgtataaccattagaaatttgagggtcatttctcaattcatcttggggaatttcttcattagtaatataatctgcatagttcgctgggtctaagtaaggcatgtaactagtatctaaatccttttttttcttgttactcatattaaacttgcacctcctagaaaactataaaaaagtttacaaaaacttattctaataatatatatattaaaaaagtttataatatgtgcattctaattatattaaattaataaaaattattgttgcaaatttaggaatgatagcatataatgaacatatgaacagttattcatatattaaaacaatggaggattaaagatgagagaagagataaatgattgtaattgtaatatagtacatgaagaaatagtaacagaggctaaatcaactatgccagatgaagagatgttatatgatttagcagaattatttaaagtatttggggatactactagagtaaagatattatatgcattatttgcaaatgaaatgtgtgtatgtgatatagcgagtttattaaatatgactcactctgcaatatctcatcaacttagagtactaaagcaggctagattagtaaagtttagaagagaaggaaaaacagtgtattactcattagatgatagtcatataagccagatatttgattgtggattaaatcatattagagaaacttataaatgataaatgagaggagtgaatatatatggaagcaaataatttaattaaaaaagaatttatactaggaggattaaactgtgcacattgtgcagaggagattaataataaagtttctaaactacaagaagttaaatcttccaacttaaattttataaataaaaaacttatagtaaatataaaggaaagctttaatgaggatactactatagaaaagataatagatataatagattcaacagaaccaggtcttgatatacaaataagttctaaagaaaatgcatctagtaaaacatcaattaaaaaagagcttatattaggaggattaaactgtgcacattgtgcagaggagattaataacaaggtttctaaattaaaagaagttgaatcttctaatttaaactttgtaaataaaaaacttacagtaaatataagtaataactttaaagaggatgatgttataaataaaataaaagaaataataaattcaacagagccaggacttgatatacaagtagggtctactgacaaagtaaaagggagaactactgaaaaatcaggagctgtaaatgatacaaataagaaagaattagttccacttataattggagcacttgtatatatatttggtatatatcaaacagctacaggttatgaaagtcagtttagcaatatagtatttatagttgcctatgtaatagtaggtggcgatgtgcttttaagagcaataagaaatatatcaaaaggaagagtatttgatgagaactttttgatggctctagcaacagtaggagcattaacaataggggagtcatcagaagcagtaggggttatgcttttctataaagtaggagagtatttacaaggtgttgcagttggtaaatccagaaagtctataacttcacttatgcaaataagaccagattatgcaaatctaaaatttaattctgaagttaaggtagtgtcaccagaagaagtaaatgtaggggatataatagtagtaaaacctggtgaaaaagtaccattagatggtgtagtagtggatggagtttctatgctagatacttctgcactcacaggagagtcagtgctgagagaagttgaaaaaggagatgaaatcttatcaggtgttataaataaaaatgctttattgagtattgaagttacaaagagttttggagaatcaacagtttctaagattcttgaccttgttgaaaattctagcattaaaaaatcaaagacagaaaactttatatctaagttttcaagatactatactccaatagtagtaatagctgctttattaatagcatttgtgccaccacttgtaatctcaggtgaggtatttagtgattggttatatagaggattgatattcttagtcgtttcttgcccttgtgcattagttttatcaataccacttagtttctttagtggaattgggtttgcatctaaaaatggtatccttattaaaggaagtaactatttagaagctttaagaagtgtagatacagtagtatttgataaaacaggaacacttactaaaggtgtgttcaatgtaactaagttaaatcctgaaggtatatcagaagaagaattattagaatatgcagctattgcggaggtaaattcaaatcatccaatagcaaagtctatattaagttactataataaaaaaattgatttagatacaatagacagttatgaggaaatagcagcttatggaattagagtaaagcataatggcaattttatattagcaggtaatgagaaacttatgaaaaaagaaaatatatcttattcatcagctaaagaagtaggcacagtagtctatattgctgttgataaagtatatagaggttatatagttatatctgatgaagtaaaagaagatagtaaaaatgccataagaagcttaaaagcaataggggtaaaagaagttgtaatgttaactggagataatgagaaagtagcaaaaaatattgctcaagaattagaattggatacagtttactcaaatttacttcctaatgaaaaggtagatagattagaagatttatatgaaggaagaactgaaaaagagaaaatagcatttgtaggtgatggaataaatgatgctccagtattagctcgtgctgatgttggtatagctatgggaggcttaggttcagatgctgctattgaagctgcagatgtagtgcttatgacagatgagcctagcaagatatctaaagcaattgaaatagcaaacaagactaataagatagtgtggcaaaacataatatttgctctaggagtaaaaattatagttatgatactaggtgctggaggagtagctactatgtgggaagctatatttgctgatgtaggtgtggcacttatagcagtagtaaatgctatgagagctatgagataagggataaatgtaaatccatactatttaaaaaacttataattatatattgaagtatgtaataatgaaaggtatcaataagtttcttttaactttattggtacctttttattggagcgctttgcatatataaatttatattcattatccattgtgtttatttaatgtatttatttagtgtagagcttttatattgtaattttaaaatttagacatagaaggtttattaataagtctatattaagtttaaattagattcataaaaattataatacttatgattgtatatatattatattaatagttataatttttacaacaaaatgtgtgtgttaaaatactctaaaccaacagtatgactgtcattcaataaattatgtaatataagaaagtaaatatttttaaaaaataatttaaaaaagtattgacgaaatatttttaaggtgatatagtattacttgtccttaagaaaagggcaaacataaaaaatgaactttgaaaattaaacagtaggttaatttataaaacaagaaacaaaccataaagccagatattttgataacaatagtatctgagcctgataaacttttatttgagagtttgatcctggctcaggatgaacgctggcggcgtgcctaacacatgcaagttgagcgatttacttcggtaaagagcggcggacgggtgagtaacgcgtgggtaacctaccctgtacacacggataacataccgaaaggtatgctaatacgggataatatatttgagaggcatctcttgaatatcaaaggtgagccagtacaggatggacccgcgtctgattagctagttggtaaggtaacggcttaccaaggcgacgatcagtagccgacctgagagggtgatcggccacattggaactgagacacggtccaaactcctacgggaggcagcagtggggaatattgcacaatgggcgaaagcctgatgcagcaacgccgcgtgagtgatgaaggccttcgggtcgtaaaactctgtcctcaaggaagataatgacggtacttgaggaggaagccccggctaactacgtgccagcagccgcggtaatacgtagggggctagcgttatccggatttactgggcgtaaagggtgcgtaggcggtctttcaagtcaggagtgaaaggctacggctcaaccgtagtaagctcttgaaactgggagacttgagtgcaggagaggagagtggaattcctagtgtagcggtgaaatgcgtagatattaggaggaacaccagttgcgaaggcggctctctggactgtaactgacgctgaggcacgaaagcgtggggagcaaacaggattagataccctggtagtccacgctgtaaacgatgagtactaggtgtcgggggttacccccttcggtgccgcagctaacgcattaagtactccgcctgggaagtacgctcgcaagagtgaaactcaaaggaattgacggggacccgcacaagtagcggagcatgtggtttaattcgaagcaacgcgaagaaccttacctaagcttgacatcccaatgacatctccttaatcggagagttcccttcggggacattggtgacaggtggtgcatggttgtcgtcagctcgtgtcgtgagatgttgggttaagtcccgcaacgagcgcaacccttgtctttagttgccatcattaagttgggcactctagagagactgccagggataacctggaggaaggtggggatgacgtcaaatcatcatgccccttatgcttagggctacacacgtgctacaatgggtagtacagagggttgccaagccgtaaggtggagctaatcccttaaagctactctcagttcggattgtaggctgaaactcgcctacatgaagctggagttactagtaatcgcagatcagaatgctgcggtgaatgcgttcccgggtcttgtacacaccgcccgtcacaccacgggagttggagacgcccgaagccgattatctaaccttttggaagaagtcgtcgaaggtggaatcaataactggggtgaagtcgtaacaaggtagccgtatcggaaggtgcggctggatcacctcctttctaaggagaattacctactgtttaattttgagggttcgtttttacgaatactcaaaattagcacttttagcaacgggatttatccgttggcgccgtgctttagcactttgaaaactgcatatatatttagtgatatgacatctaatttgtaatatataaagctgataactttttaaaattatcgaagttgatagcttctaatctatcaaacctttttaactggtcaagttattaagggtgcagggcggatgccttggcactaggagccgatgaaggacgtgataagctgcgataagcttcggggagttgcacgtaaactttgatccgaagatttccgaatgaggaaactcacttagagtaatgtctaagtatcattaagtgaatacatagcttaatgaggggaactcagggaactgaaacatctaagtacctgaaggaagagaaagaaattcgattccgtaagtagcggcgagcgaacgcggattagcccaaaccaataaagttttctttattggggttgcggacatatcataacgaagaggtatcgtaattgaagaggtttggaaagacccaccacagaaggtaatagtcctgtatgttaaacgagaagacttcagatatgatccagagtaccacgggacacgtgaaaccctgtgggaagcaggagggaccaccctccaaggctaaatactacctagtgaccgatagcgtatagtaccgtgagggaaaggtgaaaagaaccccgggaggggagtgaaatagaacctgaaaccctgcacttacaagctgtggaagcacatttcttgtgtgaccgcgtactttttgtagaacgggccaacgagttacgttaagtagcaaggttaagcacttaaggtgcggagccgtagcgaaagcgagttttaactgagcgttcagttacttgacgtagacccgaaaccgggcgacctacccatgagcaggatgaagcgaaagtaaaatttcgtggaggtccgaacccacgagcgttgaaaagctcggggatgacttgtgggtagcggtgaaattccaatcgagcccggagatagctggttctccccgaaatagctttagggctagcctcaaggtgagagatacggaggtagagcactgaatgtcctagggggtattgcacctaccgaagactatcaaactccgaatgccgtcatcttatacttgggagtcagactgtgggtgataagattcatagtcgaaagggcaacagcccagatcgtcagctaaggtccctaaatgtaagttaagtggtaaaggatgtgggattgcacagacaaccaggatgttggcttagaagcagccactcattcaaagagtgcgtaatagctcactggtcgagtgatcctgcgccgaagatttccggggctaaaacttactaccgaagctacggcatcagtaatgatgggtaggggagcttcccatacgggttgaagcatgaccgtaaggacatgtggacagtatgggagtgagaatgttggcatgagtagcgagatgtgggtgagaatcccacaggccgtaaacccaaggtttccaggggaaggttcgtccgccctgggttagtcgggacctaagctgaggccgaaaggcgtaggtgatggacaacaggttgatattcctgtactaccgataaccgtttgagagaagggatgacacagtaggataagctaagcacactgttggttatgtgtgcccaagcattgaggcagtcaaagtaggcaaatccgctttgataatgctgggatgtgatggggagcgaaatttagtagcgaagtagctgatttcacactgtcaagaaaagtctctatcgaggttaaaggtacccgtaccgcaaaccgacacaggtgggtgaggagagtatcctaaggccagcgagagaactgttgttaaggaactcggcaaaatgaccccgtaacttagggataaggggtgccaccatcaggtggccgcagagaataggcccaagcgactgtttaccaaaaacataggtttctgctaagtcgcaagacgatgtataggagctgacgcctgcccggtgctggaaggttaaggggatctgttagagcaatcgaagcagtgaacttaagccccagtaaacggcggccgtaactataacggtcctaaggtagcgaaattccttgtcgggtaagttccgacccgcacgaaaggcgtaacgatttgggcactgtctcaacaacagactcggtgaaattgtaattccggtgaagatgccggatacctgcgacaggacggaaagaccccatggagctttactgtagcttgacattgggtcttggtactacatgtacaggataggtgggaggctttgaaaccaggacgccagttttggcggagccatccttgggataccacccttgtagtactgggactctaaccataggccatgaatctggtcttgggacactgtcaggtgggcagtttgactggggcggtcgcctcccaaaaggtaacggaggcgctcaaaggttctctcagtacggtcggaaatcgtacgtagagtgtaaaggcaaaagagagcttgattgcaagacatacaggtcgagcaaggatgaaaatcggacttagtgatccggtggttctgcgtggaagggccatcgctcaacggataaaagctaccctggggataacaggcttatctcccccaagagtccacatcgacggggaggtttggcacctcgatgtcggctcatcacatcctggggctgtagtaggtcccaagggttgggctgttcgcccattaaagtggtacgcgagctgggttcagaacgtcgtgagacagttcggtccctatccgtcgcaggcgtaggaaatttgagaagacctgtccttagtacgagaggaccgggatggacgtacctctggtgtaccagttgttctgccaagggcatggctgggtagctatgtacggaatggataagcgctgaaagcatctaagcgcgaagccaacttcaagataagatttcccaccgcaagggtaagactccagaaagactatctggttgataggtcgaaggtgtaagtgcagcaatgtatttagcttatcgatactaataggtcgaggacttgaccaatatttatttgatgttcattcattaagatatatgtgtagtttttagagtgctaactctaaagaaactagtattactaggttctataaacttattaaaaacttaatagaaatattaagcataaagattatgtggttacaatagcagagaggatacacctgttcccattccgaacacagaagttaagctctctagcgctgatggtacttggtgggaaactgcctgggagagtaggacgtagccacgtaatctttttttatttattaagtttcttattttaaggtactatttttaaagtatgttataaatgctttgtgtaaatacatataatagtttaaagagattgattctttaaatatagggtgagaatccttagaatatgtacccttaaaacctttaaataagaaaggagatagataagtaagtgtctgtaatcaatagttttattttacaatatggattaatctctgtatttgtattaattatgattgagtatgcttgttttccattacctagcgaagttgttttacctttatgtggagcaattgctgcaagaaatcattttggatttctgacaattttaattttaagtataattgcaggtatacttggttcgatattttgttatacagtgggaaattggggaggtaaatctatcataaataaaataatagagatatgtccaaaggcaaagaaaggaatatttgcatctcaagattattttaataaatactcttctatttctgtttgtgtatgtagattaatccctttatgtagaacatacatatcttttatagcaggtatagcaggtcaaaatattataacttttgtaatatcatctatcgtgggaataaccatatggaatacttcattaatcagtataggatatattttttctgagagttgggtaagaataatgtcacattataatgattataaattcctcgttctaattataccaatatccataatttttattggatttgttattaagtcatttatacataaaaaacatcacaagataagattataaaaaatattagaaaaatttcttttgtacaaggtcattaagacggttgagaaaatagaaggcgtcgtaaatctgcataagcactacgtttttgtaggttctcggcgtttcttttattgcttgtgtctgtggtacttttttcttaaaatgtaccatgttttacactttgttgaggataagtttgcttatatagaagaaaaggcggcagctttgaaaatcaaaactaccactttataaatattcaaaaatatgttgcctctgtgacagtttttttatattcgttcggaagattaaaaccaaatatttaaagttatagtattaaaatacgaaacaataacttgctaatattacattcactataattaacataagttactaatccagtccaatcttatcagtccactcatttattctttctattacccctttaggtgggtcattgttgaatttccattcagtataacagtgtaacatgccaaaaagaaacaagaatacaattagaataatcagtttttttatctttttcattttgatatacctatttcaatttttttcattgtgttttagccctttcagtataaatgcagaaaggcaggcacaaagtaataaacttatgatactccccataattttttctccagtagttatatagtatccagaaatattaaatattgctgcaataggaaaaaaggtttgtaagacatttgacatacccgcaaatagtccagcaatagaataaacttctgtgaatactaatgcaagccaatatccttttttcatgcgcgataccaaggcaataatgggagaaattgcaaagaatacacctatgccatcaagaaaatactctttcatgcaacttaaaaccagttttgtcgataaatcggaaaaatgtaaaacggattcagtcaaaaatgttatagtaaagagtaacaaataaagaagtatactgaatataaaagtaataatcatttttgctatggttaattttgtttcatttatgggaataagacgcagggatttaatagtgtcctcctcttcttcacgacaaataatatagcttcctaatagggcaatgacagcaggaagaacaaaaaaagttgaccaaggttgtaccgcgtccatataccaacctgcattgtctatataccgtgaaccgtcataaacgctctttaagccataatgtaaatctgggtcattatatacatcctgccctcctgcaaaaactatgactgctatcataatggatgcaaaaaatgtaatccaaacaatttttgaacgacgaattttttgacattcagcccaaagtaatttccacattatctacacctcactttcttcttcctagtgcaatgcttgcaaacaatactgatacaatactccaaatacaaatacaaagaaatgctaatgggacattaatttcctgtgaaaatataagacctggaatgtctttatttctcatgataataactcccatactggataatgggtgtaaatacatatttattgtcattataacaaaaccggaaaaggcatataccaatgtgatacaaattgggagaatgtatcctttttgagatgtagcgattgccaaaatcggcaacattacaaaagcagtgattacaccaatttctaaacattttttcaacaaatataaaatgcttgcccagctaaatacgacatatccagaaagtacactaaataacacagaagcaacggctgtaatcagcataaaacaaatagagtaaatcaaaacaacgaaaaatttactaaaaaagtatcccattttactaataggtacaatccaaagctgtttgagcatatcatactggttttcttcgtgtataagcatggtgcaaaatatacccaaaacaacgggcaaaataatccaaagtgtataaccaaatgcagaccatttataaaactttgttggctcaacacctgttttaccaaaataattgaagtatagtagtgcgaaaaacggcataatgagagcagacaacaacatcagccaaataagtttcctacgacgcagtttaagaaattctgtttgaataagtttaagcaatgccctctcctcctgtgatttttttaaagtagtcctctaaagtatcattacaaagttgagaactaataacagttacattctgcattacaagtgctttattgatttcacccatatccagagtagtgttataaaggcgtaaagtgtggtcatcttgaacggaataatccttcgtgttaaattgacgctctaaaataagtgatgtctttggaatatctgaaacttgtagcaggatatatttactgtttttcttttctagttcactcatactactttcttccaaaagaacaccgtggtcgataattccaatatcatcagccaacaatgagatttctgaaagaatatgactggagataagaattgtctttccatgctcaacgctcaagtccctaataaactttctcatctccgcaataccaatagggtcaagtccattggttggctcatctaaaactaacagttccgggtcatgcaggatagcgttggcaataccaagtcgctgtttcatgccaagtgaatatttactaaacagctttttatttttataaggtaagcctacaatctccaatgctctttttacagaattaggggcggctgtaccacgaagttttgcaaaaatctccaagttctccgttcctgtcagattaggataaaatcctggcgtttcgataattgcaccgatacggggatatactcgtttttcacatcccttaatattctctccaaatacatctacctcgccatacgtgattgaagtcaatcctaaaatcattttcataattgtggttttcccagctccgttgcgtcctaacagaccatatattcggcctttttttacatggagattgactttgtcaactactgtttgattcccataaatttttgtaagttgctttgtttcaatcacaaaatcattcatatataatttcctcacttttaataaatttgtttctacaaaagatagttgatacaacgtcaaaatcaactacaattagaattataaaacatgaaccttgccaaaaccttgccataatcttgcttttatcttgttttagagtaagaaagcctcgtacttttacagggctttaggaagcaatattgtaaattctgttcccataccgggagtgctgttggcggtaatatttcccttatgagcgttaataagttcctttgcaatcgccaagcctaaaccatttccctttgaagctcgtgaatggtcgcattggtacaacctttcaaaaatatgtgggagattgtctgaagatatacctttcccattatctgttattataatttgagcttgctctttgttttcaaaaattctcaatgtcattttgttgccactactatgggtaataatattttgtaataggttattaatgatacgggtatatgcatttgcgtctatacgtaagaagtactctatttctggtatatcaaattcatattcaaaatgactgctttctaaaacaggtatccaatcagatataatattacgggataattcattcaagtcaaaaatatcaaaatgaaaaacttgttccttagaatccaattttacccattcaaatagattttctacaaaattctttaagtaatgagccttattagacgcaacatggatatactcgtctttttcctctcctacaacaattttactttctactgcttccaaataaccgaccaaagaagcaagtggagtttttacatcatgggagagacttgtcattagctgtttgtaggcttgttctgattgtttttgctgaataagttgaaattggctattgattgctatttcgttaatatcatagcaaatttgttttgtaatgtcgttttcatctgttaaaatacggcgattaaggtttccattttttatatcctctaaagcatcttttataagtgtaagttgtattcggacacgtagcaggacagaaacaaggtacgctataataatcaggctaagagccaatatcaaaagtagatagacacttgtattcatgttaagcctccttattaaaacgataaccgacaccacgaactgtcaaaatataaaatggatggttggggtctggttcaatcttttttctcaatttactgatgaaagacatgatgttactatcgtcaaaagcatattcttcttcccatacttgtgtataaatctgttttttggtaaatacccgtcccttattagaagccagaaaagcaagtaaatcaaattctttgcttgtaagttgaacaggaatattattgatagaaacaattcggtttgtcttgtcaataatcatgccatttattattatgcaatctgtgtctgttataaaagcagggtttaacatagtataccgacgaataagagaattgacacgagccataagttcgtttatgctgaacggttttgttaggtaatcgtcagcacctaaacgtagtccggaaactttatcatcctcgtcatttttagcagtaagcataattactggaatattacttgtttctctaatttttttcagaacttgaaaaccgtctatatctggcatcattatgtctaaaattacaagagagagtgtgtgtctatttttatcgagcaaatgtagaccttctgcaccacaatgtgcagtaatagcagataaattttcttgctcaacacattttttcataagagcacaaagttctttgtcatcatctataatcaaaacgctattcatattgtacttcctttcttcttttcgctctaccatcaacaggcttttctgcgttctttggtatcagccacatatacccgagttttgaaactcctggtatgcgactttcttcacatagtttttgtactcttctttcagaaatgccccatttttttgctacttctgggcaagacatatattccatatttcaatcatcctttcctcataatttatcagcatatattatatacgtatagacgaacaaaatcaagaaatatcagtaagtagtactcttaattttgtagtgataaaatggtgcatggttttacttaaaatgggggagattaaaaaatcaattttagcttatatccttttatgctaaaatggtgataagaaatgaaacaaatactatttatataaaaggggtaaaaatatggatataatagataatctaagggtgcaaggggtagatgaaaaacttattgaagatgtactgtattttagaaattattatggtttagaaaaagatttagaatacagagtaacaaagtctaaaacttatttttatggtaaagatatcttgtctatgtgtatagcagctattttagaagaagaaaatatattattatcgggaccaaaggcaacgggaaaaaatttacttgctgataatctaggggaaatatttaatagacctcagtggaatacatcatttcatataaatacagacagttcaacacttataggtacagatacatttatagacaatgaagttaaacttagaagaggctcagtttatgagtgtgctattaatggaggttttggagtatttgatgaaattaatatggcaaaaaatgatgctatagttgtggtacattcagctttagactatagaagaataattgatgtacctgggtatgagagagtcaatctacatccagcaacaagatttattgggactatgaattatgaatatgcaggaacaaaagaacttaatgaagcactggtatctagatttatggtaatagatattcctcctatagaagaagataagttaatgatgattttaaaaaatgaattttcagatgctgatgaagaaaaattaatacactttgcaggaatatttttagatttacaattgaagtctcaaaatggagagatatctagtaaagctattgatttacgtggtcttatggcatctcttaagactataagaagaggattaaaaccaactcttgcaattaatatgggacttacaggaaagacttttgatgtatatgagaaagaaatggttggagatgtaattaaaactagaatacctaataaatgggagagtatagatgtatttccaataagtcatatttaatataggtgagattatgaaatggatatatgatgattatgaatttgaaaatagagctaataacttatcatggacaatagctggtgattacaatgaaagtatagatatatcagaaaaagattactcttcaaaagaaataggtctatattttgcaataattgcaggtgctagaagaaagtatgtagattgggatatagttaaaaaatatcttacaaatagaataagaaaaggatacaacaaagatattatactgggtctaattcaagttatattaaatacaatagttgaagaaaaggtcattaaagataggccagggatagaagacataagaagaaatgcttataaagatattgtttcacgttttaccaaaatacacaatgataatattatggataaaattaaatacacatttgtactttataatatggacaagcacccagcattagatagtatgactagaagaatagttaatgatataagaaatatagataccaatcaagatatgatggagattttaaaagcattagatgttatatatttaacttatttcgaatacatattaaatggagaagaaaatagtcttattgatgaaaataatgtagaaagtgtagaagtaaattttgatacatttgctgatttcatgtatgaagaactttatagtgatgaagaagaaaatattattgaaagtgatatagattcaatatcttcatccatgcttgtagaaggtgtaggggattttgatgattctaaatgtagcaattcagcagaccgagttatatatgttgatgaagacactgcaaataagatatattcaaaaatagaacattattatggaaaaacttatttgagtaaaggtgaaattaaaaaaattgagacacaaaattgtagaaatgttcatgaaggttgtagaatacactttacagatggagttcttagaagtgagtgtaataatgtatttcaactaaaatatgtaacaagacaaaaagaaaataatttaggaaaatttagagaacatgctagaatgtatagacagcaaataaagagattaaaagaaagtctgtcaagaattttaatagaagaaaatgctaaaagtagagtatattctgattgtggtactatattagcaaatagagcttggagagttggtagaagtaataataataaaatattttataaagatatagaaaatgaaaaagggaaatacgttattgatatattattggatgcaagtggctctcaaagtagaaatcagggaaatgtggcaattcaagcttacataattgcaaatgctctaacagaagttggcataccaaatagagtgatgggattttctagttttttagactatacaatattaaaaagatttaaagattatgatgatagtataaaaaatagtgaaaatatatttgaatatttttgtgctggtaataatagagatggtttggcaataaaatctatatgtagtggtctaataaatagagatgaagaaaataaaatcctgatagttctcagcgatggaagaccaaatgatgtaaagataggaaaaagtagtgagagaacattaagaggagaaaaggcttataggggtatagttggtttgagagatacagccaatgaagtgagaaaagctagaaagcaaaatatattagtactaggagtatttacaggaaaagaatcagaacttgaagctgaaagattaatatatggaaatgattttatatattcaagagatataactagattttctgatgtagtttcaatgtatttaaagaagataattagaaattaataaacttacaaaaaagaatttatatacataaaaatataaaaatgaataaaatttataaaaaatgtagaaattttcacagaaaaggtatacaatgatttatatagaaaatgatttaagaataatttaaaaattaaatatataatattataggttctttaagcaagattaatagggaaaaaggttaaattcctttacagcccccgctactgtgatgcagacgaaacttttgttagccactatgatgatattttttatatctcatgggaaggaagaggagtaggaagaagctaagtcaggagacctgcctaaaatattaaagtaatttcttcggggatggagaaagtttcttataataattatacagatatgttcattttatgtgtttgtatttggattatcgaaaattagaagcctagccatcgagttaggcttttttatttttatttttaaaataaatcagacatatattatttatattttaattattagaaagggagagaggggatagtaaaatgaaacaaaatatcaaattaggggttatagctgcacttatgttaatcgttttaactccagttacatcgaatgcaatgcacataatggaaggatacttaccagtaaaatggtctatagcatggggagttatatttataccattttttttagtaggactaaaatcaataggaaaaatagtaaagcaagaccctaaaaagaaagtattattagcgctgtgtggagcatttgtatttgtattgtcagcactaaagataccttcagtaacaggaagttgttcacatcctactggagtaggtcttggagcaataatgtttggaccaagtgtaatgtttgttcttggaactatagttctaatattccaagcattactattggcacatggaggaataactactttaggagctaatgctttttcaatggctattataggaccaattatatcattcttaatatttaaagcattaaagaaaaaagacggaaataatgcaatgccagtatttcttgcagcagcaataggagatttggctacatatacagtaacttcgatacagttagcactggctttcccagacccatcaggtggagtgatggcttcagcaattaagtttttaggaattttctttatgactcaaataccaatagcaatagcagagggtattcttactgtaattgtatataatttaattacagaaaatggagaaaaaagcatactagaaaataatgataaaggagttaaagctaatgagtgctaaaacaaagacgaaaactaatatattactacttttattagtagtagctcttatcatattcccattacttgttaattcgggagctgaatatggaggagcagatggtcaagctgagagtgaaattactaagataaatccagattatgaaccatggtttagtagcccatatgagccaccaagtggagaaatagaaagtttattattctctgcacaagcagcgttaggtgctggtgtaatagggtacatattaggtgttcaaaaaggaaagagaagttaattatgcttataattgataaatatgcatatacaaatagattaagtaaagtaaatccaaataaaaaagtagccataggagtaatctttctgattgcttctatggtaataaaaaatatatttgttttaagtggaattatgattttaatgagtattctagttgtttgtgtagctggaatagatttaaagaattatttaaaattactcagaataccaatgtactttttatttcttagtataggaataactcttgtaaatatatcttttaataaggcagacttattatatagttttgaaatttttagtttcaatgtaggaatatcaaaagcatctattgacatgtctattcatgtgttatttagagctatgtcttgtttgacttgtgtatacttttgtatacttacaacaccttttaatcaattaatattcttctttaaaaaaatgcatttgcctgatacttttgttgagctatcaatgttaatatataggtttatattcatatttttagaagaattttcagaaatatataagtcacaagaactaagatttgggtacataaatttaaaaacttcatataaatcattaggaattcttggcagtatgctgtacaaaagacttatgacaaggtatgatgatatgtgtatatcattagacataaaattgtatgatggtaaatttcacatagtaggggataatgatgtttaaaataaataatttaacttatcaatatgaaaagaataccaatgcactattaaatattaatatggatttttcaaagggaaatgttataggtataataggttcaaatggttcaggaaaatcaacattatttatgaatttaatgggtatattaaagcctacatctggagaaattctttttaaagaagaaaagttaaaatatgataagagaagtttatacaaccttagaaaaaatgtaggtattgtgttccaagacccagaaaaacaaattttttattcaaaagtatatgatgatatagcctttgcaatgagaaatattggtatagatgaaaaaataattaaagagagaataaacaaagctctagtagctgttaatggaatagattttatagatagaccagtacattttttaagttatggtcagaaaaaaagggtagcgatagcatcagttatagcaatggaaaatgaaattatattgcttgatgagcctacagctggtttagacccagtaagtactaggtctattgtagatataataaagggattgaataaagataatataaaaatagtaatatccagtcatgatatgaatttaatgtatgaaatatgcgattatatatatgtattggataaggggattttaattgatgaaggaaaggcagaaaatgtatttgtaaatgaaaataacattatacaagctggcctagaatccccatggttagtaaaagtacatagaaatatgaatttacccttatttaagaaagaagaagatttgtataagtattggaaggaaagagaacttaatacaaataaataattaagccctaaacctattttaaaaaaatagatttatatataataacccttaacctagaccccttaaaggtgccttatgattccccaaatcataaggttattttttttattaaacaattaaataaattatatggaaaaatgttatttaattgtaatatattggaaataatctattaatataatacataattataatttgaagtaattcatattttagattaaaatatatttatggctgttaacaggaggagaaatatgaatttagatacattaaatcctgctcaaagagaagcagtagaaaagactgaaggtccagtacttatactggctggtgctggttcaggtaaaactaaggtattaacaacaagaatagcatatcttatagaagataaaggtgtacaagcaccaaatatattagctataacatttacaaacaaagctgcaaatgaaatgagagagagagttgaacaaaatataggtcctgaaactaaggatatgtggataagtacattccattcttgctgtgttcgtatactaagaaaagatataaataagattggttacaatagaagttttgtaatttatgattcagcagaccaagttacattggttaaagactgtctaaaagaattaaatttaagtgataaagtgtttgaaccaaaagcagttataagtgcaatttcaggagcaaaagacaaactttatactccaaagcagtttaaagatatcaacatggcagataatagaatggttaagattgcagatatttatgcgttatatcaagaccgtttaaaaagaaatagtgcacttgactttgatgatttaatacttaaaactgtagaacttttcaaggctaatgatgaagtattagcatattacagaagtagatttagatacataatggtagatgagtaccaagatacaagtaaagctcaatatgaattgataaaattattagcaagagaacatcaaaatatttgtgttgttggagatgatgaccaaagtatttatggatggagaggcgcagatataagaaacatacttgaatttgagaaagattatgacaatgtacatgttgtaaagttagaacaaaattataggtctacacaagtgatattagatgcagctaataaagttatatctaataatatagaaagaaaaagaaaaaagctttggagtgaaaaaaaagaaggagaacttataaagatacaattaactggtagcgaaatagaagaggctgatttcattgctgattcaattgcacaaatagctagaaaagaaaatagaccttataaggattttgcagtactttatagagcaaatgcacaggcaagacctgtagaggacgctttaaatagaagtcaaattccatacaatatatatggtggtacaaaattctacgagagaaaagaaataaaggatttgttggcgtatttaagagttattcaaaatccacaagatgatatatctataaaaaggattataaatgttcctagaagaggtatagggcttagaactatagaaaaaattgaagatagagctaacttaaaacaggaaagtatatactcagtattaattgatatagaaacaaattcagatatatctactaaggcaagggcaagtataagtggatttgttgatattatagggactcttagaactataaaagaagtttatcctgttagcaaacttatagaaaaagtcttggatactacaggatatatggacgagcttgtagagataagaaataaaaatgaaaaagatttaacaggcaaaggtgaagaagctcaagacagaattgataatttgagagaatttatttctatagctttggagtttgaaagtagtaatgatgatacttatgaaaataaagacttagagacattcctaacaagtatagcacttacatctgaatcaaatgatgaagaagacaatgatagggtttcgcttatgacaattcatacatccaaaggtttagagttccctgttgtgtttttaacaggtatggaagaagggttatttcctatatcaagagctataaaatctatgagtgattcacaaatagaagaagagagaagactttgttatgttggtataactagagctaaagaagagctatatatgtcattgacagagaagagaacattatatggtaaaacaaatgttgcaatagcttcaagatttatggaagaactgccagaagaatgtatagaaagattgtacaaagtaaaaaaagaactaagctattctaaagcaagttataatatgttagataaatatactaaaaagtatatgagtactataagcaaatctaaagttgcagataaagttaatgctacaataaaagattctaataaagaaactaatccagatgatataaaacttggttctaaggtacatcatcctaaatttggggttgggacagtggtttctataattggtacagatgttactatagcttttgaccaacagggaattaaaaaaataaataaagaatatacaacactaaatattttataatggaggtaaatgaggaatggatagtataaactttgctaaaaacttaatagacttcatatatgatagtccgtcgtcttttcatgcagtcgagagtactaaggaaatcttagataaaaatggatttgaagaattagttttgaatcaaagatggaatctaagagttggtggaaagtattatgttactaagaatctatcagctatagtagcttttgtagtaaattcagaagatatagaaagagatggatttagaataataggctctcattcagattctcctacatttagtattaaaccaaatgcagaaatagaagctgaaaaatcttatttgaagttaaatacagaatgctatggaggagcaatattaagtacatggttggatagacctcttgggatagctggtagagtagttttaaaaggtgatagtatattaaaaccaaatgaaaggcttatagactttaaaaagccaatttgtataataccaaatctagcaatacatttaaatagaagtataaatgatggtcattcatataataagcaaaaagatatgttacctttagttgggatgttaaatgatacattagaaaaagataattttcttataaagcaaatagcatctaacttagatgtaaatatggaagatattatagattttgatttatttttatatgaatttgaaaaaggaagtttaataggggctaatgatgaatttatatctattgggagacaagataatcttgcaatggtacatgctagtttgaatgctcttgttaatactaaaggtcaacaaggtgtaaatgtaatggctgtatttgacaatgaagaagttggtagctctactaaacaaggtgcagattcaaacatgttgttaaatatattggagagaatttgcatatcaatgggtaaggatagagagggattctttgagtctatttattcatcttttatgatatcatcagatttagctcatgctattcatccaaacattccagaaaagcatgacccaactaataaaccaataatgggaaaaggtccagttataaagataaatgctagtcaggcatatactagtgatggatattctatagctatttataaaaatatatgtagagaagttaatgttgagtatcaagaatttgttaataggtcagatgaaagaggaggaagtactataggtccaatatcttctactcatatagatataccatctgtggatgtgggaagtccaattttagcaatgcactctataagagaattaggaaatgttgaggaccactatagtatatataaaacatttagtaagttttttgaaatataaatataagataaacaatttggagatgagactatgaaattaggattatgtttagaaggtggaggagcaaaaggggcttatcaagcaggagtagttaaagccttgtatgatggaggaataaataaattttattcgatttcagggacatcaataggagcaataaatggatattatttgtacacagggaatgttgataacttggagaaaatgtggacaaatataaaagatatccagaatggaaatgtaaaaatagtaaataatactgtggataattctcctgctatagacaacctaagggaactagatgatagtaatatagaagaaatgaacttttatgttaattatgttgaagttgataataaagtagtatcagaaaagattgttgacatatcaaaaatgcctcgtaatgaagccattatcagcatttcatacagtgggttgttaccatcaaatccaaacgcaactcttggatttaaagaacaatttgtgaaagatgtgcaagaaggaatttatgatggtttcaaattagatggaggtttaattaggagtgcattaattgaaccattaattggggataatgtggataaaattattttaatatccacaaaatataattatgagttgccagaggatattaaaaaagtatatgatgaagataaaataatagtagttagacctaatactcaatttgctcctaaagatacgcttaactttgatgatgagttttgtaaaactatttatcaagaaggatacgaaataggaaaaaatatacttgatagactttaatttagagtataatataataaatgtaattatgtaatttaactaatgaaaaggaaggtaataaattatggaaaataaaaatcctatagtaactatagaaatggaaaatggaaaagaaatcaaaattgagttatatccaaatatagctccaaatacagttaaaaactttgtatcattagtaaatgaaggatattacaatggaataatatttcatagagtaataccaggatttatgatacaaggaggatgcccaaatggtacaggaatgggtggcccaggtcactcaataaaaggtgaatttagtggtaatggatttactaacaatttaaaacatgaaagaggagtcatatcaatggctagaactatggcacctaattcagctggttctcaatttttcataatgcataaaaactcaccacacttagatggtcagtatgcaggttttggtagagtgatagaaggtatggatacagttgatgaaatagcatcagttagaacagattcagctgataagccacaaactccacaaattatgaagtctgttactgtagaaacttttggaatagattactcagatgtagaaaaaaactaaaacttatataaaaactagattgagttataaataaaaattaaaaatatatattacttaaaaatgaggataaagtgaaatgttattatgtttttagacaaatacatttcactttttaatttatttgtattgtggaaagctatatattgtatgattttaactaaaaaataaagttttattaaaaaaattttattatgattgtttatatatttatttttaaataataatgtattaaataaatatataaaatatgtggaaaacacttatttcagtattttttaaacttattttatttattctatttaataaaaataaggttttttataatttttacttataaaaaaatattgttatggtaatatattctatttacaattttataactttggtttacaataatagagacaataaatcctaaaaaacataataagaaaaaagtgcttaatattttagaaagactggtttagtttacaccagctaagccagtcaaggaataatttaaagtgtaatatataataatgaaaaagaacatgctattagaagtttctaatgacatgttctttttttgtagaaatcagcattattatataaaaatttaatactataaattttaattgtattgtaactaagcatgtattttaaacatagtatgatatagacccaaaatggagggattataaatgagaaaaattatactttatttaaatgatgatacttttatatctaaaaaatatccagataaaaactttagtaatttagattattgcttaataggaagtaaatgttcaaatagttttgtaaaagaaaagttgattacttttttttaagtgagaataccagatatattaaaagacaaaagtatattaaaagcagagttatttattcatattgattcaaataagaatcatatttttaaagaaaaagtagatattgaaattaaaagaataagtgaatattataatttacgaactataacatggaatgatagagtgtctatggaaaatatcaggggatatttaccaattgggataagtgatacatccaactatatttgtttaaatattacgggaactataaaagcatgggcaatgaataaatatcctaattatgggttagctttatctttaaattacccttatcagatttttgaatttacatctagtagggattgtaacaaaccgtatatacttgtaacatttgaagatagaattatagataattgttatcctaaatgtgagtgtcttccaattagaattacaggtccaatgggaccaagaggagcgacaggaagtataggaccaatgggagcaacaggtccaacaggagcaacaggcaattcctctcagccaattgctaacttcctcgtaaatgcaccatctccacaaacactaaataatggaaatgctataacaggttggtaaacaataataggaaatagttcaagtataacagtagatgcaaatggtacgtttacagtacaagaaaatggtgtgtattatatatcagtttcagtagcattacaaccaggttcatcaagtataaatcaatattcttttgctatcctattcccaattttaggaggaaaagatttggcagggcttactactgagccaggaggcggaggagtactttctggatattttgctggttttttatttggggggactacttttacaataaataatttttcatctacaacagtagggatacgaaatgggcaatcagcaggaactgcggctactttgacgatatttagaatagctgatactgttatgacttaaaacgtgtctaaaataatcttaaaaactatttaggttttatttaaatgacaaaagtatttttatatattgagttttacctattttagaatgaataaaataacaataataataaaatatattcataaaaattttaaatttatggatttttatttaactttattatcaatatatgtataataaaaaactgtctcaaatatagatttgagacagttttcgttatttaaaaattttatattatttaaaatttttgattgcagtagttaaattagggactaattgtttttttcttgatacaacacctggtgcaaatgtaccttgaacaccttcaacatcaaatgcgttagcaattaagctatcttctgctttatagattaaataagaaccttctttgattatatctgtaaccgcaagaattagtttgtcataatcagtcgaatttatataagataaaaactcatcttttttagcaaatatagagtctatgtctaaggtaaatacttgtccaataccaactctatgtccactcatattaaattctttaaaatccatatttactatttcttctatagtatattcatctaaagaagtaccgcatttaaacatatccatagcgtatttttccatgtctacttttgctattttacttaattcttcacaagctttcttatccatatcagttgttgttggagacttaaataataatgtatctgataatatagcagataaaagaagcccagctatttcataaggtatctcaacattgttttctttgtacatttgataaattatagtactattgcatccaacaggcataactctaaatgacataggaacatcagtagaaataccaccaagtttatgatggtcaattatttcaactatgtttgcttgttcaattccatcagcactttgagcatattcgttatggtcaactaaaacaacattctttttagatgggtttaatagatgaccttttgaaactaaacctaaaaacttattatcatcatctaatattggataagatctgaagtttgtttctagcataatctcttttatttcatccatataatcatcttctttgaatgtaattaaattttctgtagcttctatagagtctaagaaactacattgatttattacattagaagttttataattgtcactttcaacagaaacaacagacactccatttatcttagcaagagctagcaaatcttttgaaatctctgtatgattagtaagtattaaaagtttaacttttgtatcaatagcatattcaatactatcatatctatctccaacaatagctatgtctccttcttttaaagtctctattagagtctccattccaaatgataaagtgactactctaccttttatatcttcaccacagtccacaagaatagtaccattaaggtttttacaaatgtttgatagtgatgtgtgtatagttgtaaagtgttgatgaagtagatttttagctatttctttcatagtaatgataccagcaaaagttccatcatcataagttacaggtagtgttttaacatttttttcatccataaggttataagcctctaatatagatgaagttggtgttaaaggtactactttatcataatttaaatctctaacttgtattctaacattatctaaaatttcaggtgcatctaccttaaagtaatccaaggcatatttagcttcttttctgatatctcctaaagcataagctgttgcttttattcctagtttgttctttaaatgtgctaatgaaattgcagaacatattgaatctgtatctggatttttatgtccgaaaactaataaactcattttaatactcctttcaaaacttgaatataataataattgataaaaatattatatcaaaaggtagtgagtatttgttgtaaaaagaaaaaaatttagtgaaaaaatattatataaaatttatttcttacataaatactacaaatttaatataaaaattattattatatatatttttacccaaccaaacatagaatcaaatttacttttatttaaaataaattgattaaatctacctgggaaaaaattaattaatatgttaataaattaaaaatttataaatattttatactgtaaaaaattttgtatatatattatcattaaaaaattaacggtcttaatataaaaattatttatctatatgaaaagcataattattacatattgacttaaaaataacttatagagattagaataattttagtttgtatattttttaaaaccatacagttgttataaaaagaaaaattgcacacaagtcaaaaataagtgttattttataaaaatacgacaaaaattttatttactacttatacaaataacatgcaaataacatataaaatttaataagtaaaaaaaatgaaagatataaattatcattttagtattttatttagttgaagtaaattattcaaatgaaatatatctcatttagataaaaaattttagtaaaagtaaaaaaaataatatatttgttaaaaaataaattgacaaaatattcagaaaaaaacttcttgacctaagagagtaaaataaataaaatctaaggtatagagatgaaatctataaaattattttaagtataagttaaaaatatagatggtgcatttaagatttataaaaattagagatgcataattattttagggaggtttttagtatggagaaaaaagaaaaggtagtagaaaaatcaaatgttgaagtatgtagtcctgaaattgtcaacagtgttgaaacattaagaatgagattagaagaaattagattggcacaaaaagaatttgcaacatttacgcaagaacaggtagataagattttcttagctgcttcaactgcagctaatcaacaaagaatacctctagcaaaaatggcagtggaagagactggtatgggtattgttgaagataaggttataaaaaaccattttgcctcagaatatatctataatgcttataaagatactaaaacttgtggtgtcatagaaaaagatgaagcatttggttttacaagaattgctgagccagtaggtgttttatcagcagttataccaacaactaatcctacatcaactgcaatattcaaatccctaatagcactaaaaactagaaatggtataattttctctcctcatccaagagctaaaaactgtactatagaagcagctagagttgtacatgatgcggcagttaaggcaggagcaccaaaaggacttataggttgggtagatgttccttcgattgaattaactaatgttgtcatggcagaggcagaccttatattagctactggtggacctggaatggttaaatctgcatactcttcaggtaaaccagctgttggagttgggcctggaaatgtacctgcaataatagatgagagtgcagatataaaaatggctgtaagttcaatcttagtatcaaaatcattcgataatggtatgatatgtgcttccgagcaagctgtaatagtaccagaaaaaatatatgaagaagttaaaaaagaatttaaataccgtggagcacatttcctaaataaagaagaaactgaaaaagtaggaaaagtagtaataattgatggttcattaaatgccagaatagttggacaaccagcacatgtaatagccaaaatggcggatgtagaagttccaaaaacagctagaataataattggtgaagtagaatctgttgaattaaatgaaccttttgcacatgaaaaactttctcctgtacttgcaatgtacaaatctaaaagttttgaagatgcagttgctaaagctgaaaaattagttgcagatggtggatatggccatacatcttcgttatatgcagactctataaatcatccagatagagtagagaagtttgtaaatgctatgaaaacttgtagagtattagttaatactccatcgtcacaaggtggtataggtgacttatataactttaaattagcaccatctcttactcttggttgtggttcttggggtggaaactcagtatctgaaaacgtgggagtgaaacatttacttaatatcaagacagtagctgaaaggagagagaatatgctttggtttagagcaccagaaaaggtttatttcaaaaaaggttgtttaggtgtagcagcaagagaatttaaagatgttatggataaaaagaaagcctttatagtaacagattctttcctttacaataatggatacactaagaagctaactgatttgttggatgagatgggaattaagcatactacattctttgatgttgctccagacccaacattagcttgtgcaagagaaggagctaaggctatggctgatttccaaccagatttaataatagctgtaggtggaggtagcgcaatggatgctggtaagataatgtgggtaatgtatgagcatccagaggtagacttccaagatttggctatgagatttatggatataagaaaaagagtatatgtatttcctaagatgggtgaaaaagcgtattttgctgctatcccaacttcagcaggaactggttcagaagtaactccatttgcagttataactgaccaagattcaggtgtaaagtacccattagcagattatgaattaatgccaaacatggctataattgatgctgatatgatgatggagatgccaccaagattaacagcagcatcaggtgttgatgctttaacacatgcattagaagcatatgtatctatgttaagaactgaaccagctgacggtctagcactacaagcaggtaaaataatatttgaatatctacctcgtgcatacaaaaatggaaagaatgataaagaagcaagagaaaaaatggcaatggcatctactatggcaggaatgtcttttgcaaatgccttcttaggaatatgtcactctttagcacataaattaggtgcattccaccatgttcaacacggtgttgcaaatgcattattaataaatgaagtaattaagttcaattgtgcagaagctccaaataagatgggtgcattctcacaatacagatatcctgattgtatacaaagatatgctgaatttgcttcttttgcaggaatcaagggaaatacagaccaagaaaaagtagataaccttataaaagcaatagatgaattaaaggcaagagtaggacttcctaaaactataaaagaggctggagtagaagaatctaaattcttagaaacattggatgttatggttgaacaagcttttgatgaccaatgtacaggtgctaatcctagatacccattgatgagtgaattaaaagagatatatctaaaagtttattatggtaaataatattcattgtacaacataggttctattgggtttgtatataaattattagatttgaatataaatagagttttattagagaaacgtagaagtaactataaataatagattataacttaaattctgaatggaaatgataaaaagtcagtaatttaatggtaatttcgaatatgtgtatttaatcaattaactttaaaattagtcggaaaatttttttattacatataattttaaagcataatatataaaaaactttatgaaaaaattataaaaatattcagaaaattctattgactaatttatttatcatgatataataaatttagaaaagaaaaaaattggggcctattaaggcccccttactattttttgatagatttatttaaaattactttctcattttgattttttatatttattatagagtcagtataatccacttcaaagttggcaaaagcagagaataaatctatatctcttaacaaatgaattgtcatacattgattgttcttatttatccttagaatcaatgctcttacaaatggaaattgtattctagaattaaataagttagaaccatcagtatctatatctaagctacgataattaatatctataaatatatctacatcatcattttcttctcttattattctgtagtcaaaatctaagtttaaatttaaattatctaaaatcaataacatttaaatcctcttttctataaatagttttagagtgttaatttaagctctccatctattatagatataattctatctgcttttctagcaatattttcattatgtgttattattataagtgtttggttatatttttttatagaactttttagtaaatccatgacttcttccgtagttttactatccaaatttcctgttggttcatctgctaggattatacttggttttgcagataaagcgcgtgcaatagcaaccctttgttgttgaccaccagataattgatttggaagatgatttttcctctcactaagacccaataaatttataatgtcttcgatgtattcttcatcaacttttttattgtctaactttagtggtaattctatattttcttttacatttaatactggaattaggttatactgttgaaaaacaaagcctactttttgtcttctatattttgctaattttttatctgaaaggcaacatatatctttaccatcgacttttatagttccactacttggtctctcaagacctcctactaaatgtagaaatgtgctttttccacttccacttgggccaattatcgcaacaaattcacccttatttatttttaaatttgcatcctttagtgcatgtacagctgtttccttttttccataaatcttacctaagttaagaatctctaatataggcataattaatcctcctattctgtaatgtttatagcttcaactatactaattttatttattttccttaatggaatatatgtagctagaatacctacaattatgtttgctaaaacaactaggatatatattttgtaatctattgaaaatcccaatccatatgatacaaaattatacgtgtaatacattctaaactgtattataagccctaccacaatggtaattacacttgagagtattccatataatattccctcatagagtatcatatttttaaatcctctctcagagataccaatagctcttaacattccaaattcgctagttcttgaagttaagttataacttatgttatttattatattaaacacactaattataaacattactgctactattccataagcataagtcagagccctagctgtcatcttatcaaagttttctttttccattagcatattagctgttgtagttccaggagattcacttcctatttcacctaagagtgtatttatcttttttacatttgcatttttattaatatctacataaactacattatatttatctacaccagttagtttttttagatagtcgttacttgttattacatctataccctgatctccagaatataggtaattatctgcaaaaggataacttacaatagctccaactttaaactcatattctagatattcataattatcttttagttttatataaagatcttgatctatctcaccttttggatatttgacctttatagtatctcctacttttatatctacagcaggcgtttctgtaccaggagtataacttagcttgtatttatttgttttagaaacttgtggtacgtataatatagcgaggttttcttttttcattctttccagatttatactcccactcactaagtatttttctaatgaatttatcatctcatcattgtaacctcttaacttttgtttcattgtatattttccagtattcttattttttatgaatagaggaaaatccttataataaggcgttgaattaataatattgtagtaatctaatccatttaatttatctacttctattcttgtatctaagatgctggcagttttgactttgtcaattccatttatattttttattttatctatctgattatcattaagtccttttatatccttgaaagaatcagctttattagattgatttagttttaagaaaaaatttgttagaataaaatctgcattcatatatgtttcttcttgaccatttttattttgtatatctgaaaaagaatatttataattctcctttatgatcattatacctcctagactcatggataatataattataatgaagccctttttattcctaaagatatttttagcagatatagattttgttactgatatatttaaagttaattttgatatcaaagaattgaccttatttatatttttatcagttccaaaggtttttcttatagagtcaataggagaaattcttcttatctttaaatatgtaaagaaacttataattagtattgtcagtattatacttccaattgataaaagtattattttatctggaataacaaaaggggtaactgttacattaccttcaaattgaatatttcctgcagtcctattaaatatttgtgcaccaccaatacctgtgcatataccgataggtattgctatcaaagcaagtatgaaaagttcataaaacataaacttgaaaatcttgaagttagtggatccaatagctcttaagataccatattcctgtattctttgatatatcgatataacatagatactatatattacaataccagaaaataggctcatagtaattgcagtgtatttacttgagttatctaaagtaccattttccctagtagattctataagcattttgttttttccaacactattctcatccaacatagtattttttactatattatctatgcttgtatttatatcaatgccattattaaattcaatataagcataagaaaatttatccaattttgattcattgagatttaaaaaaatttcacatgtccctttatttttctcaataggtctatcttcaagtattcctacaactttaaatgtctctggtttttctttttgatataatttaaaagtaatgttctgatttatttctggttttaaacccagactatttaaaatccatttctctacgaccacctcattactagcttttggaaggtgaccttttataagtttggattgattagtcaagtaatttttatttgcatattctaggtttatagctaatctttcattaggatctgtatagccatagtgagatgttatacctaaatttttaatatcttttctagactttatgtattctaattgatttttatttatatctttaaagtatacatgatcacttccagtttctctttttaatttatctacctctgcttgttgagcacttcttgagagggtaccaataccaacaataagtgatgtagcaagaattatacttagagcaattgctaaagaccttgctttataacttattatgtatcttagtgctatttttaaattatctttcatatttaccacttcctttcttagctaaatcaattatatgtttatttaaaatatatatcaaagtaagtatcttcaagttttgagtacttaattgtacaaatttatatgtgtatttgcaagtttaattaatgtacatgtaaattttgactttttacataatttttctaaaatgatataatcctcatataaagtgtagatgggaggggaattatggagaataattttatatttcctatagtaatactaactttgtttatatttagtaatcttataatgaataaatacaggttttataaagaattagacatattaaaaagaggaatattaacgttttttgtatcgtgttttgtatggattttattcatggagggtattgagtatatacaattaagtttaggatataattttttacttgaaggagtattaaatattatactttttttaattttaattattttaagcttttatataggatttaaatttataagattactagacaataacaataaacaagagtataagctacaaaaattagacagtaaaataaatcataaggacaatataatcgtaaaattaagaagtcaaaaacatgactatttaaaacatttacaagtagtatattctctattaaatactgggttagctgaagatgcaaaagaatatataacgaatatatcaaatagctttaaatcaaaaaattcaagatatgggaaagtatcttatttagatgctatagcttccttaaaatatgaggaatgtcttgaaaagaacatatcttttgatgtatatatccaagattttatggataatttagagattgaacctaatgatatgagttcagtgctattaaacataatagacaatgcaatagaatctttgtctgctatacaaaaggaaaagaagtatataagattacatgcatatgaagatgaatttcagtatattatagccataaaaaataatggtcctaaaatacataatgtcgaaagtatatttttggatggatttagcactaaagaagggcaagacagaggttttgggttatatctagttaaaaatatactagataagtatgattatagtatacttgtaaatagtgacgattttttaactgaatttgtaattttaataccaaaatattattagttaggaggagagaagtctgtgataaaagttttgatttgtgatgatgataaaattgtaagagatgatatagcaaatatagttaaagagtccggatatgtagattatgttaagaaagtcaaggatggtatagaagcaattgaatttataaaaagtgagaaaatagacttattgattattgacattgatatgccatataaaaatgggattgattctgccaaagaaattctttctatagataaagatatacatatagtttttgtaacaggttttgctgactatagtcttgagagctttaaagtacatcctatagattttatagttaagccgtttaaaaaagaaaaaatacttgattcaattaatatagcaatagaccacattaactctcataaaattgcaaaaaataattttatagaagatactctttttgtatataaaataaggaaacagatacatatgattaattttgatgatatagtcatgtttgagaaaaattcaagagctattaatttatatactagagatgaagatacgataaaattttatgagaactttgatgatttaaaaaaacgcctacctcctaatttctttatgactcatagacaatacatagtaaatttaagacttatacataaggttatacctataaataagtcttctttagagataaaatttataaattttcaagaaagtgctactttaaataaatctttagaaaaagattttctatacagattttatagggttaaaaggttttaatgaagaaaaaaattttcagtgatatacaatatgtatgatgaagatatcatataaatttgctatagttataaattaattcgtataaaatataatataaaacatattggactttcatggaaaattagaaagcccaatatgttttagagataaatcttatatttataagttgcttaagatactagggtctttaatcttattatcttcagcaagtaataagattttagacataatctcagcagtcttagggtcttcatcagcgaatggaaggaatatcttacctctactttgagaatgtacaggaagtatattcaaagcacccatcccttttttatgtacaataccagaacccatatgcacagaatactcacctaaattacctgtgataagaacatgagagccttcaaaattgatattgttaatttttaataataataaaagttctttagcaattgctatacgcatctctacagtagaatggctagtttcagggtcaacaccaccagcatgagcgacacttacaacaaggtctatatcacgcataacttctgagaatagaattggaggtatagaagctaattctaaacttttataagtttttctatcaaaaaattctactgtttcaatagtaggaggctctatatctgctggtgaaaaccaatctgcaagtgcaaacatctttgccactatattttctttataaaatactttctgtaatccctcttcataatcgacagtccaaagctgatttctaagaagtgctacagttttctttggctgaatttggtgaccagcatatctgcgagatatagttttttcagatatttcatcagaatttattctataatactcacggaatacttgcttaaatggttgaacaagttgcttactaaataaatcatgttggaactcactccacttaccagattcaaacaaatgaactggatgtgcaagttttaatttattttttgctgtcaacttataagtttcaccttctatattgcaaataaagaacttagacttatcattataaacatatccaatattatcatcacatacccatactagatttttaatcaaagggcagataactggatttttatagatattggcaatttctttaactgtaaatactatttcatttttcatagcttgttctaaactctgttttgcacgagaatactgactctttaaatctttttggacagatttaagttcaagtacatatggatgtttagcaatagcttttggtatactctttaaagacttgttgcctttttgaactttagtagatgcttttccgctttcatcaacatctatccaaattgaagtaccatcaatatcttttggtttaaatagatgagcaacttcatttagtttttcagtctcaagagcccacatcatacgatttacatctccaaatccagcacttctagctagattttctagcgctatagtacaagcttttgattcactttcacgacgttgtgcaccaaattgcttgctttctttagcaaacttttgaataaattcataacggaaagttgcttcttttaggtctccttttttcataggaagtaaagagaaacttctcaatttatcttgatttctatttgtttcaatttctttcatcaacatgtctttatcaagcttaccaagtgtagcatcagcatagagttgtgcacgtctatgagagttaccaccactagttatatatttagctgacttgtaaagtatattgaatctttcttccccaatagttttatatgaatctaagaaccaatctacatcaaatgcaccatcaatgaaactacgtggtgaaataggggagaatagagcaacctctgattctttttgtgcagagaagccttcatttatatgtgcatggaagtaccaaattgtacttttcagacccttccagtttaaatatttttcaattatgtttacccattgaggggcatacatagcagattctattaatcttaactcagtaatgtcggtatttttaagtaaactttttaatttttttgaatcatcttctttagtaggatagcaatttttaagtagagaacttaaaacatctttttttgaataattgctaccatatgaatatcctctctggaaagtttctttaccaagagcgaccaaaatatttacaaaataatctataccttcaaagtattgtatattattagctagatgagacacttctgttggcatatcacctctacgtgattcaatttctataattcggtttgtaacagtttttaaattatctttaagccaagggtacttttctaatgtgtcaccagcccatctaggatttgttaatgttcttattatatttgatgcgttgtatccacttatcatttctctattaacttgctcttcagtcattaaacctaattcatgtgcacgagcaaacacatttatgctagtatagaaaggaaacttatattctagcaactgataatttgaaaacgtagtgtagaaaaacttagtaaaagaaatatcatcataaataaacgaatgtgctttatcaagccaatagtttaaaataggggcatttaaagcagggcagtattcattttgtctgtaatagtttttagtaaattcaactctttgttttttacattgttctatagtcaataagtttctaagtttatagtatatttctaaacaatagttaaatatttctttatggtcaaactcatttagtaaaactcttaaaagttttcttgtaagtccattaaatttaaatttttcaagttttgtatatattttattttgttttttagagtcaaggacatttgaatatatagatgaaaaccaacttttttctgtttcattatatccacatgtacttatactataaaataagatatcaagtattaatttgtaatctaagtcaagctttttactagtttctctccaaagttctgccaatggataattatcaagagtatcattagaaactttatatttaataggagtcaagttataagtagaataacctaaaagcactttgtctacattacctgaccatctttcaacttcatattcataatctgcattttcagtaataagctcatcaaatttttcataaacttttattattttatttatatccgtatcgagaattttttttgcttctttttttgttgctacagaaacagaatcctcactagtagataaacttatatttgaaataattttattaagctttgatgagctattagaatcatctttaaaatcaaattgttctggaatttgaactttgttttcagggttatatattccaaaaccattttctttgcagtaatcattttttgctttacctaacaaattatcaattaatatttgaacttgagatgtattctttttagatttatcaatatcctctataagtaaaataagcttattatatagttcttgtctatcagaattgtcttttaataagtttacaatttcaagacctccaaggcatttttgagaatttgaagattttatcagtgaagaagcaatattttccaaatttgaatcatcttgttcaagtaaaatttttattactgtttgtctaatagagcttgtctttaaagacaatagattggttatcttatctaattctacatctgttagctcaagctttctaagtaaactcaataccgtttctctattggaaacactcttatcacttaaacattccaataaaaattcacgttgtctatctgtctttggttcatttacaaaattgactataagtgaagctcttaaatctgaactcataagatgacaattttccataagcacatctataaattgagcattcatatcgtatgctgttaaagtcatcatacatttaagtatttcatgagaagaaatttcaatccaagtccatggaaatacacttcctgaaaatgattttgtctttgaatttaaaatttctaaagtatgttttaaactttcaaattgttcttttctagcatcaaagtctttgtcaataggagtgtttgacaagtcaaaattagtttctctgttttgccaactatagtagtagccaacagaaccttctacatagaaatttgtaattacccatgctagtatctctaaatcatcacccttaatgtttttagatgctatagaatgtttaaaatatgtactttctgtatgcgataaaaagtaaagagctacaagttttttatatttttcctgacaagaaagtaagttttcaataagagagtaagagtcatatatgttgtaagttgcagtagcccataaggcaaaataaatttcaagattatcattgctattaattgattctatacggaacttttcatcagtcaatgatttatatgaaagttctaaacatttacgtattattccaggtttttggtctgaaaaaccaagtcctgtccatgtatccaaggctcttataacagaactaaatcgctctaaattgttgtccaaaatagtttttaacatgtatattgatgcagaaattgtaccctcatctaaactctctacaatttgctgtctaagtccttcttgttgtttggctgccaaaagaagtttagaaagcatttcatagcatttatcactatgactcttcatgataccaattatcatttgtcttgtaagtagagcagtttgattttctccaaatattacttcttctaaggcacttgttactttttgatttcctttgtctatttctagtgctattttatcactcattatagagtcatagtacaagaccttatttggaagagtaagataatctataactgaaaaatcataataaattaaatcaacatagtttgaaataaaccttataatacctctaaaataatccacaagtttatttgagcgataccctttacgataatatcctcctgaatatgtataatccatctttcttttaattaattggcaaagttcttctacttgttcagaagtaaatattaattctaatgcattttttaaaggtccagaaaggagctcgtccatatttttaatttcgtagtagtggcaattgtagtatttctttatcatatttaagaatttgtcctcaggttctctataatagtatgaactattttctatgcagtcccaaagagattttgctaagtcgtagtactgttttgaagaagatttagtaaaattatttttaaaattttcaattattttaggatttttttctactctagtacgttctaacatttatgtacctccaaattatttattttaaaacattcttccagcaagcaaggtaagtcttataaaagtaaatatatctccacttttcagatttataggggaatcgagtttttcaataacatcttcatttataagcactttgtagattccatcttcaaatgcctgtaacgctacttctattgccttttctacagattgtttattctcattgtaaatagagccaaatccaacttttccaatatcagcttgagattcaatttcttcattagttaagaagtttattattgatttttctgggattttctcattatattcaagaacatttttagatacaatttcagagatagcttcttttaggcaattgatgttgtcagatacatcaaaaggggtaagttctaacataggtttgcgtttgccaacagccttaactctaaaataaatttgcataaaatcacctcgcaaaatattaattatgtatttagaaatttaaaatttatctatttgttatattatatcattttgtgaattattaatgtgaattatggaattattttacaaaaaatagaaaaaaagctatcttaaagtctaaaaaagcaataaaagataacttttaactataattatatagaattataactgtacatttattaaattttaattttagaattatttttgataactatctttttttatttataaattttgttcctaaatattttttgatatcttcttcaggagaaaagtcatcaataagtatttctttcccagtgtcttcaaatactacaagaacttcacagtcaccttgcaagaaaaattttctaactgtatcttctttaacttctctaacttttattacattctttttttctttttcaaagtcttttgtgtaataacttcccatcatattaattatttttgtatatctattcataaaatacctccatatgcgattaaatttaaaaaatatgttataataattgtttgtattaacttaataattataacaaggagtaataataatgactagtataaaaaataaagatattttaaattgtatagattattccattaaaaataagctctttgacaaactaaatgatgtatataagtccttgccagtaggaaattgttctggatgtggaaattgttgtatggagtcagtaggtataaatttaattgagtttttgaatatattttgttatcttgaagatagagttgatttaaaaaaaagctgtataagtaaaatattagattattattttgaggagtatacaagaaagaacccatgtccatttaaagatactaataatagatgtctaatatatgaagttagaccattaaattgtaggatgtttggacattggaaaaaagaggattataataaaaatttagataatgttattgagaaaaataataactatagagagttaatgaaaaagcaatatggatttgaaataaatgatgaagtagtaaattacaggatagattattgtgatagatttattccaaataaagattatttaagtaaatctaagagattaagcttttttgatgagcttatgatattagactcaaatatttattcaagtggaaatatagatatagactttagggatagaggtatagttgaatattttatagagtcattactttatagaaatttagcatataatgtgaaaataaggatatctaaagaatacaaaataagaaaaagaactatagatagaataaaaagaattgttcttgtatagttttatattagtaagtaataaattgtatcataaatattgtcaaaatgaggtgaggaaggtgaatcttacaaaagtaaaaggaaataccttttttataaaaggtggcacgaatacaggaatatatgtatttgaagataacacagcacttatgatagacccagggttatgtggttcaagacctaggagagtaaataaagtattagatgaaaataatatacaggttagatatattataaatactcatggtcatgatgaccactatggagcttgtaatcaatttaaagaatattataaagatgtgtgtataatgtcatctgaatacgacaaattatatatagaaaatccagaattgttttcaaagtatattgttgggggaaagagcaatgtatttatggataatatcttaaaaaataaaatgttggatgatataaagatagataaatctatagaagttggaaaaattgaattaaacaatgaaatgtttgatataattgagtttcagggtcatacacctggtagtatagctgttttgacgaaggataatgtgatttttgttggcgatttattgataggagatgaaattctatcaaaatacgatttcttgtttctatatgatatacaagaacaaataaattcattagaaaaattaaaaaatatagattttgagtacttagttttagggcatggcaagcaagttatatcgaaagaagattcttataaattaatagaaaaacatttgaatgctttaaaaaaatatttatatcaaataagagagttgcttgtagaaccgaaatctttagaaattttattaaaaaacattataaataacaataatttaagcaataattataaagagtatcatttttttaaatcttcgttagtatctgtcataagttacttagttgatttagaagaaatagggtatatattggaaaatggagaattgctttactatacaaaaacaaaataaattatgataaaataaagaaggtcataaaaaacaaataaagggtgagcaatatggaatacgaaaaatggaatgagatactagcaccttatgaacatgcagtagaggaattgaaaataaaatttaaaaatataagaaaagaatatttagcaaaaggtgaatattctcccatagagtttgtcacaggcagaacaaaaaaaatatcttccataatatctaagttaaaaaggataaatgcaaaagatatagaaactgaaattgatgatattgctggtataagaataatgtgccagtttgttgaggatatatatgctatagttgatttgataaaagtaagaaatgatatgactataataggagaaaaagattatattacaaattacaaagatagtggttatagaagctatcatgttataataaaataccctataaactccattgcgggttcaaaggaaattatatgtgaaatacaaataagaactcttgcaatgaatttctgggctacaatagaacattcattaaaatataaatatgaccattacatacctgagactcttgctgaaaggcttagaagagcatctgatgctgcctttcttttagaccaagaaatgagtgaaataagagaggacataatgaaagctcaggctatgtaccaaatgaagtctatagctattagagatactctaaatagaatacaagagttatatgacttgggtgatacacataaagctatgcagtaccaaagaaaacttgatagaactgaaacagataaaaatataactgaaattttggaattaaaacaagaaatagatatattactagagcaatataaggatactaaggtagatgataaagtagttcagtaaaaaactacttgtagaaaatttgctaaatattaatggggctgcctcttaatggaaaataatttctaaaaagagacagcctatttagtgtaattaagaaaggaatgatattatgagtttgtatgctataggtgatttacatttttcaacatcagtcaataagccaatgaatatctttggaagtaattgggatggtcatgaaaagaaaattatagataattggaaagaagttgttaaggaagaagatatggtcttagtactaggagatacatcttggggaattaatttatcggaagctaaaaaagatttagatataataagcaaacttccaggtcagaaaatacttataaaaggaaatcatgattactggtggacaaccgttacaagtttaaataagctatatgaagacatgcgttttattcagacaaatttttatgaatataaagattatgcaatttgtggaggtaggggctggatatgtcctaatgatgttaaatttgatgagactgatgaaaaagtttataaaagagaagagcatagacttagactatcattagaatctgctcgtaaaagtggtcactcaaaaataattgtgattactcattatcctcctacgaatgataaattggaagaatctttatttacaaagttatttgaagaatataatgttgaaaaggtgatttatggtcacttgcatggtaaagaatcttttaaaatgggattgaaggggattcgaaatggagtagaatatacattagcatcttgtgactatacagaatttaatttaataaaagttcacgattaaaaaacataaattggtaaatactataagatacatgattaaaaataaatatttgagggatttcggttttgagaaaggagacacgacttatgaggtggatattagtttttatatttttatatcttattcctttagtagtgatattcagaaattacaagaattttaagaggtcttgtatctacagtagtatttatgtggtattagctacaacaataatgataagtaatatttatatgagtggacttaataaaataaaagagtctatgtattatcacaattatatttctgatgagacatatgatgaaaagtatgtatcaaattttaaggaaaaagaaagtaccgatttaaaacaggataataaaaagaatgaagaaatatcaaataataaaaatttaaacaacaaacaagatagaaatatacaaaataaagaaagtaatgaagaaggaagtaatgatataaaagaaaagaataattctgatagtaatgtttcagtgaataataaatcagaaaaacaagaagataatacaaaagaaaataataaatatacaagtaaagaaaaaaatagtgaagatataaaaaaaatagatatggaaagtataggaatttttaagaaagaaatttataatatagaaagagcagctttagttccaatgagagaatgtataccttacactaaggatatagcaaaaaatataactaaattatctagtataaaaaaagatgttacaaatgccagaaacaagtgtaaagaagttgtaaaagaatatgaaaatatgcagattccagaactttctaaggagaagtatacagaaacattgagtaatgctagagatgacgtaaagaaagcatatgagcttagagaaaaatctatggaaagtgctttgaaattaataaatactaaaagccctaaatatatagggaagataacagaatatcttgatttatcagataagcagatagaaagttttaaaaatagattgaacgatttaaaagaagaaataaataattcagaaacaaataatattaattaataagatttaaagatataagttaaaagggagattatgatgaataaacagagtataggaaaactaaatatgttttttatggggattactcaaagaaaccttgataataggcatttttttattgagttagaggtgatttttaaatctggaagaaaagagtttaaaggaattgcaatagaggaagataataaatataaatttaattttaaaggaaaatcagatttatatacgtttaatgagttgcttaagaatatttctaaagaggcagaaaattatgatggattagtatttaaatatgttgagcgaggaactattgttgtaattgaaggagacaataagaaggtaaatgtaaaatatttagataataaagaagaagtacctaaaatagatgaatttacggcatctcaaataaaaaacagagattattatgtaaaagtaggacaagcaaatgcacttttaaaagaaattggagtacttacaaaagatggtaagataaaaaatgataaaataagaaaatacaatcagatagaccattttgttgaattgatagatagtattttaaaagaaataaaggataaagactgtataactatcttggattgtgcttgtggaaaatcttacttaagctttgtcttaaatttttatataaaagaagtattgaagaaaaactgttattttataggaatagattattcagatgtagttatagaagcatcaaaaaatatggctaaaaacttgggttataaaaatatgtcatttataaaagaggatttgactaattatacacctaatagggatgttgaccttgtaataagtctacatgcttgtgatacagctacagatatggcaataggtctaggaattagagcaaaatctgaagctatagtagtagtaccatgttgtcataaggagttattagggcaatatagatatgaagctatggaaccaatattaaaacatggtgtatttaaagctagatttgcagatttgataactgatggtttaagaacattgttattggagggcaatggatatgatacttctgtagtagaatacatatctccacttgatacaccaaaaaatttaatgataagagcgataaaaactaaaacgaataatgacaaagcattaaaagaatataaagaactgaaatcacaatttggagtggaaccaaccttagaaaaacttatatattagttaaaaatgtaaaatttacgaaaagcttgcttaaatatgcaagctttttggtattatataggtatagtcatatccagagttttgatttataattaaagctgtgctataatatttgattaatcaaatcaataaatgttacatggaggtaaaaatgaacaaattgaatatatgtattgatatagatggaacaataacaagcccttatcattttcttccatacctaaatgatatctttaataaaaatataactgaagcagagtgtataacacataattgggaagaattgtatggttcgggaataagagatgtgtatgcggagtttaataataagtatatacactcatatgatgaagcaaagattgtagagggtgctacagaggtaattagcacattatctaaaggacataatttatcttttgtaacggctagacatgagtgtttaactgatgtaactaaaaattggctatcgagacaaggattttcagatatagatgtttacttattaggaagtgattataaagttgaaaaggcaagagaactgagttgtgacatatttatagaagataatcctttaaactcagtgcaactagctgatgatggtgttaaagtaatacttctggatactaactataataaagatgttaaacatcaaaatatagttagagttagtaattggatagatattgaaaagattataaaacaaggtatttaaagatttgtagattgaaagggggagcatatgatagatttaaaaattgaaaatagaaaaggaaaaatccatgtaaagagcagtgaaataaaagacattttagaattacgtccagacttcgaatatgtacaagatatatcaaatactataaatcaagaaaatatattggtatttgattgccagttgacaggaaattcttttgatatggatgatttagatatagaagaaatattggaagagttaggtgaagaaatagatgagtcttatttcagtgttttatttgaagatgtaagagcgtatttaaaagatgctactgatgagatagaagcagacttacaagataattacttatttgataatttgagatgttattttgatatatacaatataaatcaagaatttacagattttaagtttgtatttttagtttcttttaaagatataaaaatttcttcattagcaaacctagctaagattgtttctaagagacagcttataggtgcatctaagttttatagttaaaatgaaatattattataataaaagctagtagccttgtaaaaatataggttactagttttttatttgttcactttcacaaaatttcagaaaactatttacattctaaaaaaagtaatgtatattaaacataatgtacagtataatggataaaaagtttctattaaattactaagtttatttaataatcaaaataatttatcttatattagtatgtattagggggtatttatgcaaagtttaaatgaaataatcgctgaaaatttaaaaaagataaggaaagaaaaacatcttagtttagacaagattgcacaacttagtggtgtaagtaagagtatgctatctcaaattgaaaagtgtgaggtaaatcctactatatctactttgaagaaaataactaatggactaaaaatctcatttacatcattgatggagaggcaggaaagtgacatagaattgattcaaaaaagtgatatagaccattttattgaagataatggaaagtatataagttatccaatatttccatttgactccaaaagaagatttgagatatttatgattgaaatagaagaaggtggaaatttagattcaaatgctgaacttccaggaacacaagagtttataactgtttttagtggcgaagtaaccattaaaataaatggagaagattacattgtatctagtggaaattctataagatttaaagctgatgtatcacatatatatagaaactcaggcaaaggtatagctaaaatgagtatggtagtatattatatataaataatttaatggaattagagtgatatttagatgattttaggtatgaagatatattatatttaagttataggagtgtgatttatggatgaataataaaaaagcagtttttttcttttgtagtgatttaaagaaagacccagtagccagtaatgtgataaagtgttgtgaagaaataatggatttaaatcaaactgatattgttattgatgataattttgtattagaatttaaggataaaaacaataacttatttcattttgtaaaaacaaaagatgtaataagtcataattataaatattatcttccaattttaaatagacatttcagagattatgattttgcaggagttgtaaattggcatgagggagaaaatgctccagaacatatcctaacagctcatacaattggagatgttccaacaggagaatttggaaattcaaatccaagatactttaaaaatctaatcaatgctattgaggatataaaaaatgaaaatctacttgatgaatttactacattaacagaagcaactcactggtctggaacaacatatggtgaagaatctaaattaattacagaatattctgtacctatgttggatattgagataggaagtagtagtgatagttttaataatagtatagcaatacaggtattggcaaaatcattaattagagtatttgattgtgatgaacctttgaagactttattatgtgttggaggggtacattttgagaaatctttctcagatattataaaaaataaagaatataacatatcaattggacatgtattgccaaatcaatggattgtaagtggaatgtatgatgatgaatcgggatttgagaaactagaaaagtgtataaatagtattgaaggtggaattgattgtatagtttttcatgataaattaaaaggtacctataaagagcaatgccgtaaactaggtgaaaaacttaatgtacctgtatttaaacataaaatattaaaaaatcccaaagacttacctatatggtagtcttatacagttaatataacaataagtcggattaatttttaagcgaggtcaaaaatgatattatcttattttgcattattaattagagtagtgctattagcttttgaaagagtagttgtaagattattaggtgatgaagaaggagatatttataaaaatatagcttcatcatttctatttttctttatagggggagtatgtttacttccatttagcataatggatagagttagtgattggtcgtttttaataccatgttatataagtagtttagtctattcaattggttcagtagcgtatgtaacgtctttagcaactggggaagtttcacttgttactccaataaatagtttaaattcattgtttttactgcttttatcagttatatttttaggtgaaggtttaagtttagcaaaagttgcaggaatcataattatgattggtggagtgtttatattaaaaaaagtaagctcttttttaaagaatgtctctgtaatttttaacaatttaccatgtagattaatgtttttatacatatttttgcagtcagtaggaagagtattggataaggctttttttgtacaagtatctcctatattatattcaactatactgtattttttcgtaggtttaaatttatttatctttttagcatttaaaaagaaacaaaaaataatttgtgagatttttagtaataaaaaggggctttcaattttaagtggtgctattaatggatattcttatttagcattattaattgctttaaataatctagaacttagtatagcagagccattttctcaagtatctatgataataactttaatacttgctcattttatattcaaagaaaatataaaagaaaaaataccaggttcaattttgatactaattggtgggtggctactgttactttaattgacataaaaaatgaattataaaggtgctattagttagtatcagaaaatttaaaaaagtattgacaattcttttaggcaaatgttaatataataatacaaaatagtataaatagaagacatgttactggtaatgcaggcaggatcgaatatattgctttgatttttcaaggtgtttatataggttctgccttttttgcatcttgaatggccattcataaaaaattatggagaaggagattacaagatgaattataaaaaaactgccattgacattattgaacaagttggtggttcaaaaaatattttagctttagaacactgttcaactagactacgctttaagttgattgatagaagtaaagtcaatcaggatgctttaaaaaaagtacaaggtgttatgagtatagttaatggggcacaatttcaagttgtcattggaaatagtgttgttgatgtgtatgatgaaattttaaaagtttgccctttagatacaaatgatagtactgtaaaaactgaagaaaaaataaacttaggaacaagatttatagaatttattattaatatttttcaaccactgatttttgctattgcaggagctggtattttaaaatcactgttgatgttattagcaatgtttaatattttaaaatcagattctactatatatacattattagttgctatttcagatgcaacattctatttcctacctcttatggtagctgtaactactgccaatgtattgaaatgtaatcgtttagtagctattgccgctgtaggatacttattgcttccagcaacaacaactgctttaagtgaaggtgtcgaactatttggatttacaattccaaacattgcctataatgcacaagttttcccggctatcttatgtgtgtcttttttggcaacaatggagaaaatttttaacaagtattcaccaaaaccaattcgaactttctttgttcctatgatgtctttggcaattactgttccaattactctaactattttaggtcctttaggatataacgttggtacaatttttacaaccattattttattcttatataacaaaatgggattcttagttgtaggattacttgctgcttttcttccatttatggttgcaacaggaatgcacaaagcactaataccttattcaattaatacaattggaaagttgggttatgaagctttatatatgacatcttcattagcccacaatatttctgaaagtggtgcttgttttgcagtagccttgcgaacaaaagatgaaacattaaaacaaacagcattatctgcaggaatttctgccttgatgggaattacagagccagctttatatggtattactttacaacataaaagagcaatgttaggtgttgtattctcaagtgcaatttctggtacatttttaggattatttgcagtaaaaggatttgtaattgttggaccagggcttgccagtatgagtatgtttattgacccaaacaatggaaacaatttgatttttgcgagtattggttttgttattgcaatattaggctcgtttattattacactgattatttggaaggaagatacaaatacagtagagtcatcaattggagatgttgttgaagaagagctagaagaagaaaaagaagtaaatatcttagtaactccagtagaaggaaaagtaatagatttaagtaaggttaatgatgaactatttgcaagtaagactttgggagatggagttgcaattataccgaccaatggaaatttatacgcaccttgtgattcagaagttgtgatgttatttgaaacaaaacatgcaattggtttaagaacaaaaaatggggctgagattttgattcatattggaataaatactgtaagtatgaatggagatggatttaaaacatttgttaagacaggcgataatgtaaaagaaggagatttattaattcaatttgatttagacaaaatctcacatgctaatttagattcaactgttatgattgtaaacaataatggagcagattatgcttataaagtgttaaaccagtcttatggcaatgtaaaaaaaggaagtatcttgtttgatgtaaagggaggaatataaatatgagaaagtttccagaaggatttctttggggaggagctacagctgctaatcaatttgaaggtggttggaatttaggtggtaaagggtggtctgtatcagatgtagcaaaggcacactttgatgcagatgtgaaagactataaatctaataatgaaatcacaacaaaagatatagaagaaggattagcacatcctgaagatgaagtaaattatccaaaacgtcatggtagtgatttttatcatcactataaagaagatattgctctaatggcagaaatgggatttaagacatatcgaatgagtattgcttggtctcgtatttttccaaatggagatgataaagagccaaatgaagaaggtttacagttttatgatgatgtatttgatgagttgataagttatggaattgaaccacttgttactatgtcacattatgaaccaccattaaatatcgttttaaactatgatggatggtattcacgacaagttatcaatatgtttgttaggtatgtagaaactatctgtgaaagatataaaaacaaagtgaaatattggcttacatttaatgaagttgattctatgattcgtcatccgtacactactggtggtttagttcgagaccgttttaaggataaaaactttgaggaagttatttttcaagctatgcatcatcaatttgtagctagtgcccttgcaacaaaaatttgccatgagattattccaaattcaaaagtagggtgtatgttaacaaaattaacgtattatccatatacatgtagaccagaagatgttttggcaactcaacaaaaaatgagaagtatttatgcatatagtgatacgcaggtttttggtgagtatccagtatatttactttcgtattttaaaaataataacattcaaatagcaaaagaagaacatgatgatgaaattatgaaaaagtatccagtagattttatttcattctcttactatatgtcttcttgtgaggcagctgatacaactggattagatattacacctgggaatacgttattagctgtaaaaaatccttatttagaaatgagtgaatggggttggcaaattgattcaataggtctacgtatatctttgattgaattatatgatagatacagaaagcctttatttatagttgaaaatggattgggagctaaagatattttaactgaagataaaaaagttcatgaccaatatagaattaattatttaaaagaacactttaaatgtatgttagatgcgattatcgaagatggcgttgaactttggggatacacttcatggggttgtattgatttggtcagtgaatcaacgaaacaaatgtcaaaacgttatggatatatttatgtggatgctgatgattatggaaaggggacatataatcgatataagaaagatagtttttattggtataaaaaagtaattgaaaataatagtatagattttaaatgaccaatagaaggtgagcaaataaaatgaactacataataaagaaagttttgaactcgagcgttgttttagttcatgatgcaaagtataatgaatttattttgctagggaaaggaattggatatggtaaaaaaacaggagaatatatttgtggttccaatgataatcaaatgtttgtccctgttgaaaatacaaaatcaaaaaaatttttagaattaatggatgatattcctgtcgacattttaaagataacacaggaaataatagtagaggcagaaaagttattgaactcatcttttaataaaaacttatacttaatattagcagaccattttaactttgcaattgaaaggatgcgtaaaggaataaaaattacaaatcgagtattttgggaaataaaaaattattatccaaatgagtttaaggttggaatggttgcaatttatatggtagaggagagattgggcattcaattaccagaggaagaagcagctaacattgctttccattttgcaaatgctatggcttcagatggaaattcatatgatacgattaagtatgccaaagtaattggagaaataattaatatttttgttttttctttgaatagaaccttagataaaaagagtatgcattatatgagatttataacacatataaaattttttgtggaaagatttttttcagatagtatgttaagcagtggtgatgatttattatttaatcaaatgaaaaggtcaaatccaaaagaaatgttaattgcattaaaagttagagattttttagaaaagaaatatggaaaaaagttaacaaatgaggaaatagctttcttggttgtccatatcgcacgagttaagcaatagagtgaattactaatattatcttatacgtctacatggtagaaaattgaaagaaggtaaagtatataaagaaactgagacatattattttgttgttcattatgtttattttatgagtgtatcctgttaaaaatttaagttaatatttataattaaaatatacaaatagttaaaataagtttatgtggttatgaatttattttaactatttttttgtttaatggaaaatatgttttataactagaattttatttttaattaattataatacaaaaaactttataaaatcttcagaatttcttaaagaatatgtaagtaacataagatatattatatttagttggtaatataaagggggcaatatttatgaagaataaaaaattcaatgttataacactgataatacttgataatcatatttatgccattaataaagagcagattagtactaattcaaaaagaatttactttgaaaaaagtcgatttttcagtgattataagtgaataaatatatataaacatttaataaatttagaagttaaatgttttaatacgaaaggatacacatatgataaatttagaagaaaagtatttaacacgaaaagacacatatatgataaaaattctagaatacaatggacatattcgaaactggaaagttctctgtgaagaacttggaatcgattcttcattatgtagagatgagcgtgaacgagcaattttagtggaagcatataagacatggggatatgatatggcaaatcacatgcatggaatgtttgcctttgcattatgggatactgtggaaaagaaactcttctgcctaagagaccagtttggagtaaaacctttctattattatgagactgaaaatgggaagcttctctatggttcatctattcgtaagattatggagcaaccaggatttgtgaaagagttaaatgaagacatgttacagatttatatgtctttcacatatgtagcaggtgaaaatacattcttccgtggagtaaagaagcttatgccaggacattaccttgtctatcagaataaaacagtatgtattggtcgttattggaaacctgaatttcatcctgaccacagcaagtctattgaggaatggacggatgaaattcatacaacacttcagaaaattatgccagaggtaaaatcagagaatgaaactgcagagttattcttatcaggaggtgttgattcatcttatatattggcaatgtcagatatagaaaaaacaggttcatgtggttatgaggaagagcgttttgatgaatcaaaattagcacaacagacagctaatattcttgggtgtaaaaattcgagatatataattacacctgaagagtattttgcgtcagtaccttatgtaatgtaccatatggagcaaccaactggagatgcatctgctatcgtttttgctattggatgcaaggcagcagctgaaaacacaaatatctgttactctggagaaggagcagatgagttttttggtggatataatatataccataaggcagagtgttatggagagaatttgaagacattttatattggaaatacaaacattatgaatgagggtgagaaaagaaaaattcttaagaaatacaatcctgatgtgcttcctattgaagtggtaaaaggaatttatgaagaaacagaagaactagatacacttactaacatgtcaaatgtagatattcaaatatggttggaaggagatatttattttaatatagataaaatgagtactgcagttggattggaagtcagaatgcctcttacagatacaagaatatttgatattgcatccagaataccatcagaatataaagtgaaaggaaaagagaataaaattgcctttcgtacagctgcatcaaaaacattaccagaagagattgcttttagaaataaattaggatttattgtgccaattcgtatatggatggctgatgaccaatataataaggatatccgagataaattcaatagtgagatagcagataaattctttaacatagatgagattaatgagatttttaatgactacattagtggaaactctgataattggagaaagatttggatgatttacacattcctagtgtggtatgaaatctattttgtaaaatgttaatacaagaggaagaatcacctgaaagaccattcaggtgattcttaatgttttataattttacttgctaattcttatgtctaactcttaatggtatatcaagtttttttgccagttgtttagattcttctatttcttctggagatatttcatctactactgaaaaagctacttcttttatatattttttgcaatctcttgcaaaacctaacatatagtcaaatgatttttctccaaactttggttgagtaactctattataagcttctttatttggggcattaagacttattgatactgtatctataacatcttttaacagaatagctgtttttttgttatgtattaaatcacttagaccatttgtatttattcttatttttatgctacttttttcttttataaactttgctacctctatcaattcatttattctcattaatggttcgccatatccacaaaatacgatttcatcatagtcgtctaaattgtatttattgaaggcttcttttacttcatctacacttggctcatgctccaaccataaactaccactatttgcaacttcatctttttcgtttcttatacaaaaaacacaactacatggacatgtattagttatatttacatagatactattttcaattgtatataagatattcataattttccctccataaatttaaattcttaattaaaataacgttttttaaaatcaagtttatcaagtgccatacctaagattataaaaacaataaaacttcctattggctgtaataagccaagtaagctcattacaaatgcacttgtaaaacttccaataattataccttcagcaaacatgtataaaactaatcctactatacctgctacaaccgaagcaactatatttctcttatttattatcttgtcacttttagaagtgaaaaataatacaagtattggttttatgattatagttggtattacccagatagcagcacctgtagataaatcagctagaccagcaccaattgcagaagcagctatagcatagtttgttggcaaaatagttgcagctagataaataaaagcatctcctatatgaacatatccattgtttccaccaactggaatatgtaatatatatgctattgtcaggcatattatggatgcaaataatgctgaagtaacaatataggtagtttttttagaagtaactttattcattttttccaatatactccctccctaaaaatccagagctaacataattgttatgttttcttataaatatattaatattaatcatacaattttcatagtttgttaggtgttttttttgtaaaatacagattgtacccattcaaatgtatataattagaaaagtaaaaataggtaaaatgtatagagtaggagtagttagagtaagttaatataaatttaatttggtataaataagaggagtacaagtttaatataaaaaataatataagagagtctactcaatatatactgagctgactctcttatatttgggaaattaaaggctattttgttagataatagctaattaatgaaaaaatatatttataaaatactaatttactctattagtagcagttcctgtttttataacttctacagcactacttaaactagaataaactatattttcaatcgctgtactagtgaagaaaccaaggtgatgagtgaatataacttgttccatagaaagaagtttatttatttctgggtcagttaattctccaggattcatttttttgtttaagaacaatccttcagtttcaaatgtatcaagggcagcagctctaatttttcctgactctagtgcttctattaaatcccctgtattaattaaaccaccacggccagtatttactatgtaagctccatccttcattatagctagagtatctttatttatcatatgttttgttccttcaagtaaaggagtatgtaatgttataaggtcagcttcttttagaaggtcttctaaagaatctttgtaagttaatatatcatttaaatcactatttggatattggtcaaatgcaattacattagctcctaggcctttgaataattttgcagaagtagcacctatttttcctgtacctataacaccaactgtaatagatctaacttctgttccaagaagttcagctatccaacggtaatcaccttcacagacttttttctttactagaggagtctttcttaaaaggttcatagcttgagtaacagctaattcagctattgcattaggtgaataagaaggaacgtttgtaacgataagtccattttcattaactaaatcaaaatgtatcatgtcaacccctgcagttcttgaagctataactttaaccccagcatcttttaaagtttcataaatataaggattatctatatagttagtttgttgtatagatataccatcataccctttagctttaactacattttcttcagtcatgttttcaggataaatatccacttgaacatccttatgttcttcagaccatttttttattactggttcttcataatcgcgtgctccaaatactagtattttcatatcaataccctcctgtaattattaaattattatggtaatttttcatttagaaataatatgtagcatataaggttatattttttatacaaaatttttaaggttaaaaatttagttttgaaattgttttccctgtgttattttgatatttagtaattttttatttaatgtaataattactctaaaatttatcaaagaaattgttattttttagattaaatattattaaaaaattatctaagtttgaaattagttaactaacttgctgattaattacaatgataacatgtgtttttgagtttagcaatgaaaactttttttgaaatgtcaagctttttcataaaaaaatatataaaaaaaacttttataagcatagaaagaatagcaaaatgcaatggatagtggcaagatgccacgatatgaaaaagattattcaattgcatattgttaaaaaacattcaaatcaagcgatattttgattaaatataaagttggcacgataaatgcttaacaatataggtgtaagacaataaaacaataaaaaataattttaataatttttaagttattttagataagattaggaactttgacatcagacagttaatatcagaaaaaagtattttatgagtgatttaatcgaaattttataattgatactattaaggaggaaaacgttatgcttttagaaggagttaaagtagtagaactttcaagtttcatcgcagcaccatgttgtgcaaaaatgttaggtgactggggtgcagaggttattaagattgaacctatagaaggtgatggaataagagttatgggtggaacatttaaatctccagcatcagatgatgaaaaccctatgtttgaattagaaaatggaaataaaaagggtgtaagtattaatgtaaaatcaaaagaaggagtagaaatattacataaattattatcagaagcagacatatttgtaactaatgttagagttcaagcattagaaaaaatgggtatagcttatgaccaaataaaagataagtatccaggattaatattctctcaaatattaggatatggtgaaaaaggacctttaaaagataaaccaggatttgactatactgcatacttcgcaagaggaggagttagccaatctgttatggaaaaaggaacatctccagcaaatacagcagcaggatttggtgaccactatgcaggtctagcactagcagcaggaagtttagcagcattacataaaaaagctcaaactggtaaaggtgagagagtaacagtaagtcttttccatacagctatatatggaatgggaacaatgataacaacagcacaatacggaaatgaaatgcctttatcaagagaaaatccaaacagcccattaatgactacatataaatgtaaagatggaagatggattcaattagctttaatacaatacaacaagtggttaggcaaattctgtaaggttataaatagagaatatatattagaagatgatagatataataacatagattcaatggttaatcatgttgaagatttagttaagatagttggagaagctatgttagaaaaaacattagacgagtggtcagctttattagaagaagcagacttaccatttgaaaaaattcaaagctgtgaagatttattagatgacgaacaagcttgggcaaatgacttcttatttaagaaaacatacgatagcggaaatacaggtgtcttagttaatactccagttatgtttagaaatgaaggaattaaagaatatacaccagcaccaaaagtaggtcaacatactgtagaagtattaaaatctttaggctacgatgaagagaaaataaataactttaaagatagtaaagttgtaagatattaattagtaattctagattttttaaaaggagaatgctaaagatgtacacaatgggattagatataggttcaactgcatcaaagggagtaatcttaaagaatggggaagatattgtagcttctgaaacaatatcctctggtactgggactactggaccatcaagagttttagaaaaattatatggcaagacaggtcttgcaagagaagatattaaaaaagttgtagttacaggatatggaagaatgaactattcagatgctgataagcaaataagtgaattaagctgtcatgctagaggggtaaatttcataattccagagacaagaaccattattgacataggtggtcaagatgcaaaggtattaaaattagataataatggaagactattaaactttcttatgaatgacaaatgtgctgcaggtacaggaagatttttagatgtaatggcaaaaataatagaggttgatgtatctgaactcggaagtatatctatgaattctcaaaatgaagtatcaataagcagtacatgtacagtatttgcagagtctgaggttatatcacatttatctgaaaatgcaaaaattgaagatatagtggcaggtattcatacttcagtagcaaagagagtttctagcctagtaaaaagaataggagtacaaagaaatgtagttatggttggtggagttgctagaaatagtggtattgtaagagctatggcaagagaaatcaacacagaaattattgtacctgatatacctcaattaactggtgctttaggagcagcgttatatgcttttgatgaagcaaaagaatcacaaaaagaagtgaaaaatatataaaaagagggatgaaaatgtctgaaaaaaaagaagctagagtagtaattaatgatttattagctgaacaatatgcaaatgcatttaaagctaaagaagaaggaagacctgtaggttggtcaacatcagtatttcctcaagagttagcagaagtatttgacttaaacgtattatatccagaaaaccaagcagctggagtagcagctaaaaaaggttctttagaattatgtgaaatagctgaatctaaaggatattctattgacctatgtgcatatgcaagaacaaattttggtcttttagaaaatggtggatgtgaagctttggatatgccagctccagatttcctactttgctgtaacaatatatgtaatcaagttataaaatggtatgaaaatatttcaagagaattagatatacctttaataatgattgatacaactttcaataatgaagacgaagttactcaatcaagaatagattatattaaagctcaatttgaagaagctataaaacaactagaaattatatcaggaaagaaatttgaccctaagaagtttgaagaagtaatgaaaatatcagctgaaaacggaagactatggaagtattctatgagtttaccagcagattcttctccttctccaatgaatggatttgacttatttacttacatggctgtaatagtttgtgctagaggtaaaaaagaaactacagaagcatttaagttacttatagaagaattagaagacaacatgaaaactggtaaatcttctttcagaggggaagaaaaatacagaataatgatggaaggtataccttgttggccatatataggatacaagatgaaaacattagctaaatttggagttaacatgacaggtagtgtttacccacatgcttgggcattacaatatgaagttaatgatttagatggaatggcagtagcatatagtactatgtttaacaatgtaaacctagaccgtatgacaaaatatagagttgattctttagtagagggtaaatgtgatggagcattctatcatatgaacagaagctgtaaacttatgagtttaatacaatatgaaatgcaaagaagagcagctgaagaaactggattaccatatgctggatttgatggtgaccaagcagaccctagagctttcactaatgctcaatttgaaacaagaattcaaggtttagttgaagtaatggaagaaagaaaaaaacttaatagaggtgagatataatggaagctattttatctaaaatgaaagaagtagttgaaaatccaaatgcggctgtaaaaaaatataaaaatgaaactggtaaaaaagctataggttgtttcccagtttattgcccagaagaaattatacatgcagctggaatgcttccagttggtatatggggaggacaaacagaattagatttagctaaacaatatttccctgcatttgcatgttcaataatgcaatcatgtttagaatatggattaaaaggtgcttatgatgaattatctggagttattataccaggtatgtgtgatacactaatttgtttaggacaaaactggaaatcagcagtacctcatataaaatatatatcattagtacacccacaaaatagaaaacttgaagctggtgtaaaatacttaatcagtgagtacaaaggtgtaaaaagagaacttgaagaaatttgtggatatgaaatagaagaagcaaaaattcatgaaagtatagaagtttacaatgaacatagaaaaactatgagagactttgttgaagtagcttataaacattctaatactataaaaccatcaataagaagcttagtaattaaaagtgggttctttatgagaaaagaagaacatactgagctagtgaaagatttaatagcaaaattaaatgctatgccagaagaagtctgttctggaaaaaaagttttattaacaggtatattagctgattctaaagatatattagacattttagaagacaacaatatatcagttgtagctgacgacttagcacaagaaacaagacaattcagaacagatgtaccagcaggtgatgatgcgttagagagattagcaagacaatggtcaaacatagaaggatgttcattagcttatgaccctaagaaaaaacgtgggtcacttatagtagatgaagttaaaaagaaagatatagatggtgttatcttctgtatgatgaaattctgtgacccagaagaatacgattatcctttagttagaaaagatatagaagatagtggaatacctactttatatgttgaaatcgaccaacaaactcagaataatgaacaagccagaactcgtattcaaacttttgctgagatgatgagtttagcgtaagttcattaaaataaatttactataaaatatgaaaattggaggaagctatgttatataacaaagaacaagaacttttaagaaaagcagtaagagattttgttagtaaagaattagatactttaccagcagaaatggataaaacaggtgtaatgcctaaggaattaatcaaaaaattagctgatgcaaaatttataagcagtaatatcccagaagaatatggtggtgggggagcaggatatgtttcttacgctatagtaatggaagaaatagctagaagatgtgcttcaacagctacttttgttacagctggttcttctcttgcttcattaccaatactttacaatggtactgaagagcaaaaacaaaaatacttaaaaggtatagcaacaggtgaattaataggagcatttgggttaactgagccaggagctggttctgatgcaggtggacaacaaacaacagcagaattagttggagaccactatatattaaatggtagaaaaactttcataactaatggaccattctgtgatgtagctatagtaatagcagttacagatagaagtaaaggacttagaggaacatcagcgtttatagtagaaagtaaatgggatggtttctcaacaggagctcatgaagataagatgggtataagaggaactgaaacttctgacttaatatttgaaaacgttaaagttccaaaagaaaacttacttggaaaagaaggtcaaggatttaagatagcaatgggtactctagaagttggtagaataggtgttgctgccttagctctaggaatagctcaaggtgctttagatgaagctgttaaatatacaaaacaaagagttcaatttggtaagcctatagctaaattccaaaatactcaatttactatagctgacatggaaacaaaagtttgtgcagctagaggattagtttatgatgcagcacaaaagagagatgcaggaatgagagttgctcaagaatctgctatggctaaatactatgcatcagaaattgcaaatgaagttgcttataaagcattacaacttcacggtggatatggatttataaaagattatgaaatcgaaagaatgtacagagatgctagaatcgtatcaatatacgaaggaacatcagaagttcaaaaaatggtaatttcatcaaacgtattaaaataataaataatctaatgaaattggaggtatagactttgaaaatattagtttgcgtaaaacaagttccagatactaacgaagtaagaataaataaagaaacaggtactcttataagagatggagttccaagtatattaaacccagatgatgcaaatgcattagaggaagctttaaaaattaaagatgagcatgatgatgtaactataacagttataacaatgggacctcctcaagcagactttatgctaagagagtgtttagctatgggtgctgatgatgcaatattattaagtgatagagcatttggaggagctgatacttgggctacatcaaatactattgcagcgggaatatctaaagtaggtgactatgacataatatttgcaggaagacaagcaatagatggagatactgcacaagttggaccacaaattgcagagaaattagacattcctcaagttacatatgtacaagatttcaaaatagaaggaaaagatataatagttcaaagacaattagaagatggatacgaattaataaaagtaagtacacctgtacttttaacagcagtaaaagagttaaatacacctagatacatgtctgttgataaaatagtaaaagcatataaacatgatgtaaaagtttggacaattgatgatttagatgtaaataaagaagaagttggtttaaaagcatcaccaactaaagtatttagatcatttactcctgaaccaagaggaaaaggagaaatcttagaaggtaaagctgatgaaatagctagtaaaataataatcggtctaaaacaaaagcacattatataagttggaggagtacaaactatgaatgatataaaagatttaagttcttataaaaacgtatggatatttgcagaacaaagagaaggaaaaatagctccagtagttatagaattattaggagaaggaagaaaattagctaaagaagtagatgcagaactttgtgcaatattattaggaaaagatgttgatggattagctaaagaattaatcacttttggagctgacaaagtttatgttgcagatgatgctcttttagaaaaatatacaactgatgcatatacaaaagtaataaaagatgcaatagatgaaataaaaccagaaataatgcttttcggagcaactcatataggtagagacttagcacctagaatagcttcaagagttggaactggattaacagctgactgtactaagttagaaatagacccagaagataagaaaataaaacaaactcgtccagcatttggtggaaacataatggctacaatcatttgtccaaaccatagacctcaaatgtctacagttagacctggtgttatggataaagctgaaaaagacgaaacaagaactggtgaagttatagcattagactacaaaataactcaagatgatataagaactactgttttagaaacagttaaaactaagaaagatttagtatctcttacagatgcaaatgttatagtatcaggtggtttaggattaggtggaccagaaggatttgaaatgcttaagaaattagctgacaaattaggtggagtagttggttcttctcgtgcggctgttgatgctggatggatagaccattctcaccaagtaggtcaaacaggaactactgttaaaccaaacctatatatagcttgtggtatatcaggagcaatacaacatttagcaggtatgcaatcatcagatttcataattgctataaacaaaaacccagcagctccaattttagaaatcgctgactatggagtagttggagacttacatgaaatagttccaatgcttatagaaaaattagatagcgttgatgatttattagaagctataaaagcttaatagatacaaactatataaatattactgattgaataagtcttattagttagtaacataattattaaccctttgataagttattgctagtgtgtatttgtcagttattaaaaagtctgtttgaataaaattttataatacaagataatctggataatccttatatgtatattgcttacaaattgtgagttatattctgtaaggattatctttgtttttttaaataaatcttaaatttaattaaattgtattaaatagacaaataattactaaatatgtgataaaatacaattaaaagcaaaatgaaatttttaacaaactataatcattaaaattatatcttagttacgttttaatgaaataaactacttgaaaagacgaatattataaggagttgattatatgtgctgatggtatttattgtaagcaaacaataaattttgtatgtagttcaataaattacttaatgaaaggtgcgaatattaatggataataatttaatagggcttatagaacatgtagaaaatccagccattttatgtaaagaatcaggcgaaataatatactgtaatcatctaatagatagtatttttagttttctagatataaaaaagcctagaaatataaatgaattagattcaaattttgacaaaacagaaatactgacagatagtaaaaagaaaatagctttcagagagttaaggatgactgcacatatatacaatatgaaagataataataatgaaaataatatagtttatttatttgagaagtctctaatatctgataaagtaattgaagatataatagagcatatagatgaagttgttgttgtgtttaacaaagatggggtaattgaaaagatgaacactgtcagtgatgagatattaccttttaaaagaactgaggtacttggtagaaatataacagaccttgtgagacaaggattagttgaagaaccaataatattaaacatgcttaaagtgaagaaaaagatttatagaaatatcgtttacccagatgggaagcttattgcatatacggcagttccaagatgggattctaagggaaagcttacaggaggagtactaacagggagagatatttcaagggttattaagcttgaatctcagataaaatatagtgatatatcagaagacacagagtatataagtcaaagtaagattatggacaatataaaaaaagttgttaagagagctgcagcctcagattcttctatatttataaatggagaatcaggtgtaggaaaagaaataatagcaagaacaatatataagtatagttcaaggagagacaaaccttttatagctataaactgtggagctataccaaatgaattattagagtcagagttttttggatatgaagaaggttcttttactggagctaagaaaaaaggtaaaaagggactttttgaagaggcgaatggtggaactattttcttggatgagataggtgagttaccaatgcagatgcaaaaaaaattacttagggttatacaagaaaatactattactagaataggtggtagtaagcctataaaaatagatgttagatatataagtgctactaatatttctcatgaagaccttagaaataaccttaaatttagacaagatttgtactatagattaagtgttattccagtaaaaatacctcctcttagagaaagaaaagaggatatagtaccattagtaaattatttcttaaaactttacaatgaaaagtacaatagagaagtagaagtttcacctaaagttattgagttattagaagaatattcttggccaggaaacataagagaattaaaaaacatcattgaaagatttgtagtattatcagctaaaaatgtaattggagaagatgaatttaacatgctgataaatttagatatgattgataatgaaacagatgatttatcaccaatagtggtaaatggaattatgaatcttaatgatgcatataaaatagtggaccaaataatgataagtaaggctataaataagtatggttcaataacaaaggctgctgaagttataggtatatatccttctaccatccatagaaagataaagagtggacatattcacgtttagctgtcagtttaaaaagacaatataattaaaatattataagatacataattgatacaacttaaaagagatggcttaaaaataaatttaattactttaagtcatctcttttcttttataaatatttaaaagttatattagtttatagagttagcagaacctaaaacatcatctatcttgctttcaactacagcttgtatagcatctctaccagcaccaatgtattttcttgggtcaaattcttttggattttcagctaagaattttctgatagcagcagtcatagctagtcttaagtcagtatccatgtttattttacaaacagccatagaagatgcttttcttaacatatctacaggtacacctttagcaccagctatatttccaccaaattcattacatgtagcaacagcgttttggtcaacagcagatgcaccatgaagaactattgggaaacctggtaatttgctttggatttcttctagtatatcaaatcttaatttagcttctcctttgaatttgaaagcaccatgagaagttccaatagctattgctaatgaatcaacacctgttctttcaacgaactcaactgcctcagctggttgagtatacttgtgaacatcagaagtaacatcatcttctgttccagctagaacaccaagttctgcttcaacaacaacacctttagagtgtgcatattcaacagcttctttagttattctaacattttcttcaaagtcaaaatgagaaccatctatcataactgaagagaaaccagcatcaatacaagttttaatagcatccatatttggaccatggtctaagtgaagagctacatctacacctatttcatcagaagcagccttaaccatttcaactaatgtatgaggtccagcatatttaacagctgacatagaagcttgtatcataacataagaatttttagctttagcagcttttaaaacaccttgtaattgttctaagtcacttatgttaaatgcacctatagcaaatccaccttcgtaagcttttttaaacatttcttttgtagtaattaatgccattttaaactcctcctattaacttttaaaatttacccatcacttatattataacgttaaatcaaaaaaagtatatagtaaattgtaataactataaattacaagtataatgttaaatagaagacaataggattaaataaaataataaagaatataaataatttaggaaaattagctatataatgctaactataagggtaggaactaccttattagtttggagatactgataacaatagttgtcttgaccaagaagttaccacttcaaacgttatcgaagggaattaagtggatgataattcactaaaaatttaaaataaaggagataaactatgccacagataaaaataagaggaattaatgaaaatgatatatgtaaaataagtaaaaaaatgataaatgatttagttgaagctgtaaaatgtccaagagactactttgaaatagaatgtataaagtcagttgcaataagagatggtaaaatagcagatgtatatccttttgttgaagtagcttggtttgatagaggacaagaagtacaagatatagtagcaagaataataactgatagtataagaaataatttagatgtagaaagtatggatttagcatttacagtatttgaaaaagaaaaatattatgagaatggagagcatttttaatggctaaaaagcaacgtatagataaaattctttcaaatttaggttatggaagtagaagtgaaataaagaagtattgtaaacaagggtctgtagtagtaaatggaagtgaagtttcaaatccaggaactcaagtagacactgaaaatgatgagatattatttaatggagaagaagttatatatagagaatatatatatttgattaaaaaatagctacgtacactcgtgactttagtcatgagttagtagctaaaatagtcagcatatagggaaacttatatgtagagataggatagagcctatccaatactacttgaattgctggaaacccctaaagctaaccaaactaaaacataaggatgaaataaacctaagtgtgaaagttacgaaagtagaaaaaattggttagatggtataaggttaaaccctaagtactttaaaatgggcaatcagcaggtaagctccgaataggagaaacttcaacgactattcctcttgagggaagtacactacaagctatcggtagtggaagtgggtagaccttagcggataatgccgaaggataagatatagtctgtgcttgcatgaaagtgtaagaagttcataagagaactgcataggtagtagcgaacttatgtgaacgacaacctcaaaaatgataaaagttaagacttacggttcttaaatatgttatttaaaattaaatataaaaccttctaaataattgttttaaataattacatttgttaacattattataggtgattaataaattgttcaccacagcattatataatatattaaatatgataaaatcattaaaaagtgtatcaaaaaacaattaaagtgaggtgatagcagtggaaaaagcttataagtttagaatgtatccaaataaaaaacaacaagagttaattaacaaaacttttggatgttgtagatttgtatataataagtatcttgctaaaagaatagaagtttataaaaacgataaagaaacttttacttataaacagtgtagttctgatttgactaatttaaaaaaagaattaaaatggcttaaggaacctgacaaattttcactacaaaacgccttaaaagatttagataatgcatataaaaaattctttaaagaaaaagcaggatttcctaaatttaaatcaaagaaaattaatagattttcatataaaactaactttacaaatggaaacattatgtattgtggtcaacatataaaactacctaaacttggtatggttaagataagggataaacaagtacctaaagggagaatacttaatgccactatatctaaagaaccaagtggtagatattatgtatcattatgctgtactgatgtagatattgaagtatttgaaaatactaataatcagataggtttagatttaggaattaaagaattttgtatctcaagttgtggagaatttatagaaaatcctaagtatcttaagaagtcattaaacaagcttgctaaattacaaagagaattatcgagaaagacaatcggtagtttaaatagaaataaagcaagattaaaagttgcaagacttcaagaacatatagctaatcaaagaaatgattttctacaaaaactatctactaaattaataaaagagaatgatattatttgcatagaagatttacaagtaaagaatatgattaggaattgtaaactatctcgcttaatttctgatgtgtcatggtcagagtttattcgccaattagaatacaaggctaattggcatggtagacaaattgtaaaggtaggtaaattctttgcaagttcacaaatatgcaataaatgtgggtataaaaacgaggaagtgaaagacttaagtataagagaatggatttgtcctagttgtaatgaaactcacgatagagatataaatgcaagtataaatatattaaaagaaggattaagactaataacaactcaaaataaataacttatgtaagaaccgtaggaactacggggatagcctgtggagaattagtaagacatattttagtatgcaaaattctgtgaagcaggaaccctgtgactttagtcatgggaggttcaggatgaataaacctgatggatatatatcagcaactacagataaatatgacccaacagtattagatttaattgatttatcatacttagcttttgaaccatttcctgttggaaggttagataaagacacagagggattattagttttaactaatgatggaaagctttctcatagagttttatctcctaagaagcatgtgcctaagacttattatgcaaaaattgatggagtagttactgaagaagatgtagaagcttttttagaaggtgtagtgcttgatgacggatataaaactatgccatcacagttaaatatattaaaaagtgatgatgaatcagaaatagagcttacaatacatgaaggtaagtttcaccaagtaaaaagaatgtttgaaagcgtaggcaaaaaagtagtatacttaaaaagattgtctatgggcaatttaaaattggatgaaagtttagagttaggtgagtatagagagttaacagatgaagaagtaaaattgattgaagaaagataataaagatactatagtaaattggaggaatgtctgtgaagaaaaaagatgttatagaatttgaagtagataaaatggaatttggtggtacatctttaagtcaagttggagatagagttatccatatgaagggtggaataagtggtcaaaaggtgagagctggagttaaaaaagttagaagtaagaaagctgaagttaagatgatagaattattagagaactcaccacttgaaactgaagaaacttgcaagcactttagagagtgtggaggatgtacactattgtctgtgccatatgaaaaacaattagaaataaaagaaaaacaagttatggatttatttttaaagcaagatttatttggatttcagtttttagggatagaaggaagtccagaaaacaaatattatagaaataagatggaatatacttttggagatgaagtaaaaaatggacctttgacattaggtcttcataaaaaaggaaagcatatagatatacaaactgttgaggagtgtatgttggttgatgaagacttctcaaagatattagtttctagtgtagagtttttcaatgaaaaaaagcttccttattatagaacaatgaatcacaaaggatatttgagacatcttgtagttagaaaagggattcatactaatgagattatggttaatatagtaacttcttctcaagaagattttgatatgaatgagtttaaagatatgcttttagggattgatttaaaggctgagttagtaggtgtacttcatactattaatgatggtttagcagatgcagtccaatgtgatgagttaagagtattgtatggaagagattatatacaagaagaaattttaggtcttaagtttaagatttcaccattttcgtttttccaaaccaatactaagggagctgaggttctttatagtattgctagggattttattggagattacaatgataaggttgtatttgacttgtatagtggtactgggtctattggacaggttatggctggtgctgctaagaaagtgtatggtattgagatagttgaggaagctgttgttgctgctaatgagaatgctaagttgaatggacttactaattgtgagtttattgctggggatgtggctaaggttgttaaggatttaaaggacaagcctgatttgattattgttgaccctcctagaccaggcattcataaggatgctattagggatatttgtggatttggtgctaaggagattgtttatatttcttgtaatcctaagtctttggttgttgatttggttgattttaaggggtatggttatgagattaagatggttaagtgtatggatatgttcccaaatacgccacattgtgagactgtagttaaacttattagagaataacagggtttcagacttttatattgtgtcttaaaagtagatttgccacctatttgccaccataattatttttgggtggcaaatttattctacaatgatttcaaaaatatttaccatctggtttctcatgttattagttacatgtaaatatgtatccatagttgttgaagttttagcatgtccgagtatatgctggatatcttttatattagtaccattttctaataacatagtatcagggtttttaaaataaagtgtgtattcttctagagtagtgataattaaaatatcaaatatcactatacaaaggaaagtgcaccctttttatgtttagcaaaaacgaaatattaaaaaaacttattgaagaatatgatgtcaaaacaactacagatattcaagatatgctaaaagatttatttacaaatacaattcatcaaatatttccattgtcgaattttaacggtttaaacataatatattgactgatataataaaatcatagaatattttagggggaaatagattatgtttaagaaaaagttaatagctgttgcaatgagtataactatgattagtgtagggagcttttcgtatgctcattcaggaagaactgattcatcaggaggtcatcgtgataataaaaataaatctggattaggaagttatcactatcattgtggtggttatccagcccatttacataataatggtggttgtccttatactggaggaggaagcagttctggaacaacaacttcggttaataatgaagaaaagcaaaagaggtctgttggagaaaaaggatataatcaagggtatgaagatgggtataaaggaaattatagttcatcaaattatagtggagattatagtgatacatatgaatcaaagtactcagaaggatatgaaaaaggtaaggctaaattagaagaggaagaaaaggtggctaaagagactggatataatttagggcttacaggtgctaaatctaataatacatatgaaaaagaagttttaaaaaatgcttatgataccggatattcaactggatacaatgaatataagactaaaaagatagaagaatataaagctaaagggatagaggatagcaataaagataaagaaaaaatgacatttgaagaaaacatagattctgaatttatagatgcttataataatgcttatgacgaaatacaagaacaattaaaaaatgattacactactcaaggatttgagagtgctatcaaaggagaaagatttgacacatcaactataggtaatgttaaatatgctaattggtttaaagaaggatatgataatggtaaggttaagttacctaaagcaaaagaaagtgtatataatcaaggttacaatgaagaagattttagtataccatatgaaatgaagtctattgaaactaagttaaaaggtgtatatgatgaaggtttagaaaaaagagaagaagagaaaagtagaaatgctacttatggggttggagctggaacagcagctgtagttgctggagtagtatataaaaataaaaaacgtaaaaagatatagatgctagatataccaatgatgacaagtgtataacaaatataattttaagtataaatatttaaaatatagaagggaaggttatatctatgggatttaactttaggaaaagcataaatctaggaggaggactcaaattaaatttaggtaagaagagtgtaggtataagtgctggtgttaaaggtgctagagtgtcagttaattcaaaaggaagaaaatcagctacattgagtatacctggaactggaatatcatatacaaaaactagtacaaagaaacgtaaacctaaataaatatttgatatactaagaaatagactgttacaaatagtctattttttagtatatagatttaaaaagtgacaaaattttgaaatataaactaatttcataaaggaaaatattcttttatgtagaattataatatttaagtaatattataaaatttataggaggatttcattatgaaattaagcaaaacactattggcaatagggatgtctgtttcattattgattgctagttgtccaacatcaaacgctcttagttctattaattcaataaaaggtacaaataagtatgaaacagcaggtttaatagcagataaacaaaattatgatattgcaatacttattaattctgaaaatggattatctgatggattgtcagcaagtggattgtcaggagctaaaaatgccccaatattgttaactaagaaagatacaatcccttcagaaacattaaaaagattagaaaaggtaaaagaagtatatctaattggaggaaaaaattcgataggagcatcagttcagaaaatattaagtgataaaaaaataagcataaatagaataagtggaactgatagaatagatacaagtcataaagttgcaaaagaaataggaagagtaagtacggttaaaaaagtaatattaactaatgcttttaaaggcgaaccagatgctatgagtgttgcttctatagcagttagagataaatctccaatagtattaactgatggaaatactacaagttttgctacagatggattagaaacttatgcaattggtggaaaagtcagtatgagtgataagttaataaatgaaactaaagcaacaagaataggtggagtagatagatacgatacaaataaacaaataataaataaattttataatggctcaaaagaattttacatagcaagtgggactgatttagtttattctttagttggttctacaattgcacaaaaaacacctatagtgttagttggaaatggaagtaataagagtatattaaaaaatgcaagtaaaataactgctattggaaatattgatgatgttattataaaacaatgtttaaatataactaataatgttggggattcaaatacaggtattgtaaaagatactaattcaaataatacaaacaaaccaagtaatgagcctagctctaataatcctggattaactgataaaagtacagtatatgtaactcctaatggaaaatcatatcatctaacaaaaaattgttctacactaaaaagaagtaaaacaataaataaagtaacattaaaacaagctaagtcacaaggtaaaatagacccttgtaatgtttgtgtaaaataatgtattagccaaatatatattaaaaaagacaattaattaagattgtcttttttattgaagaaatataaatttatattatgtattattaaaaagaaaattattaattataaaaaataataataaagacgataagtattaaaattttatgtttccaatatttatgatataattaatatggcaaggaataaatatttgaaaaagctatgagtggtgtttccatggaagtttcttcactttcttatgagaggaggtgaaaactatggaaaatctaatgatgagtattataactggtgttatagccagttacatttacgataaattaaagagccactctgaccaatgaactatacccactgttttatacagttaaaacatgtaaaagtggttataaagtactagtgtcaatcattagtactttttttattatattcatataattaatagctatattttaaagtttactatctaaaaaatagcacgtcaaataaaaccctagatatttaaatttttttagagctacttaaaataaattatgctatctctgtacttaaatatttcctaaattcaagtggagacatagaatttaatctcttttgatatctaaaattattatagtaatatatataatcatctattgctttgactaattgttcgtatgtatcaaatttccttaaatagtacatttccacttttaaaattccccaaaatccttccataggagcattgtcaatacaatgaccaactctcgacatactttgtatcatgccttgtgttaaaagttttgatttaaacaccctgctagtatactgatagcctctatcactatgaaagataggttttgcatttggatatacttctattgctttattaaaagtttcgaatactaagttattgttatttgattttccaataacatatgaaactatgcttctatcacctaaatccagaattgcacttaaataagcctttgtcccgtcggttaatttaaattcagttacatctgttaaccatttttgagaagttttatctgcactaaattttctatttaatacattttcagcaattacttcttgtgtacatttaacataactaaatttcttttttctacaaatagaccttaagcctacggctctcattagtctgtacactctcttgtgattgacattaagtttatactctctgtttaactgcaaggtcatccttaaagagccaaaaactcccttcttttcttcatatatcttagttatcaaagttgctaatttaatgttttcaagttctaaattacttttatctcgattgagccatttatagtatccagaacgatttactttagcgatttcacataattgtataagcgaagcttttttttcattgaataaggattgaatcgctttatatttatcttcattcttggatagtgtaattaccaccctctttctatgatttttaacttttttaagaattcattctccagttgtaatttgtgtttttctgcttttacaattttcaattccaactttatttcatctaattgagttaactcatcttctttttttgatttacctcttcggtcttctaaagcatctatcccattttctttatatttaagagtccatcttctaacttggctgtatgaaacaaagtatttttttgctattaaattgtaattaagaccatgttcaatacaatctttaacaatttcagctctttcatctaatgttgtttttctagtctccataaagagtcctcccttcggggtttcttttatcaccttatgaagattatactctttaacccaagcttttagtggatgaactgatctcattttatatttttttgagatagtatcataagatccttccccatttagataagattctatagcatttaatttaaactctttagaatagcatgatttgtgactttgttttattaaaccatcatttccaaaagtttcataatttcgcatccactctctgaatgtacgttttccaatatttaattcttccattatttttattactgaattttcaccctttaaatatgattcaattgcttcgattttttgctctgatgatactttagttttagacataacaaaaccctcctagtttcagacagttttacatatttcaactgtctcctaagaggggtatagttcacaactaagagtggctgggaacttaatataaagttccagaaaagtaaatcttcaaaataatttattgaaggaaacatcactcaaagttaagtaaaatatgtttccttgcttttattatatcacaaattaaaaatattaacacaaaattttgtgaatatatacttattattgttctaaaaaaatatgtaaataattgatttgatttcatagaattattgttgtaatatttagttaaatatacacaatctcaattaaagaagataagtattataaattcatatcaaaaaaatacataaacttttaagttataattttataaaaagtcttttagtatcattatttcaagaggaattaacatatgaaaaaataacttcattagaaaagtggataaaaaactggtaagaagatgactaaagattacatatactattacttaaattaaaaatttaatataatttataatgtatacaatttattataaaaaatttaattttaattttctatttttgatactataatatataatcttgataatttaattaaaaatctagattttacataccaaactggtttcttatttcgctatctttacttatgaactcatatattcctataaaggttattttagaaaaagttggttatttaaacattaataccacaatttctatagattgtttgttgaataatctataattatattatggactaaaaaatccaatgagttaatttattgtttttttatatttgagagattacaacttattagtttgtatatctctttttttaataaaatcaataatatataaaactattggcatatttaatgacaattcaaatattgtatataaccataatgaaagatatataaataaaattttaaatatacttaaaaatatattaatataatgtacataaaaaatatcataaatatatgataagataaatacaatagcaatattttattaattttttgggtttttatatatttaggtactggggtgatatagttgaaccaagagatattttttaaaataatgaatgaaatattggaaaatattgatgaaggggtacattttgttaataaagacgggaaaactataatctacaataattctgtacaaaaaatggaaaaaatgaacagacacgatattttagccaattcattttttgatatagtcaacaaaatgaaaataaacaggagtacactattagaagttttggaaaaaagggaagttatcaaagacaatattcaaaaatatctggacaaaaatggaaaagagataacagcaattaatactacaataccaattgatattaaaggcgagtttgtaggggcacttgaaatatcaaagaatatgacaacgatagaaaatttactaaacagaaattataaaaaaaatttagtcaataaagttagtagtagacaaaaaaagggttatgaatttgatgatattttaggggaaagtaatttgattaaagaagcaatagaaaaatctaagaaagcttgcaagtctgatgcttcagtatttatatacggtgaaactggaacgggtaaagagttatttagccagtccattcattatggaagtaataggagaaactatccatttatagcacaaaattgtgcggctttgccggaatcactattcgaaggtatcctttttggaactagcaagggaggatttacaggagcaatagataggccaggcttatttgaacaagctaacaaagggacattgttattggatgagataaattccatgcctattatgttacaggctaaactattaagggttttacaagaaggttatgtaagaagggttggaggaactaaggatatacctatagatgtaagaattattgcaacgacaaatgaaagtccaaaggtaattttaaacgagcataaaatgcgaaaagatttatattataggcttaacataattcatataaaaattcctcctcttagagatagaaaagaggacatacttctattgtgcaaaaaatttatttcaaagtataataaaaagttaaataaaaaagtggtaggaatttcagatgaagctattaaaattttaaaaaattacgattggcaaggtaacataagagagctagaaaacataatttattgtactatgagtatgatggaagatgaggtacaaatagaaacaagtatgattaatctaaacgactattacaatcttaaagagaataaagagagtaacaattattctttaaacgatttggagggcaaaacacttagtaagattatcagtgagatagaagaaaagtatatatatgaatcattagaaaaggcatcgtacaatataactaaagctgcatcaattttaggtatgaataggcaaaatttacagtataaaataaaaaaatataatatcaaaatattataaataagcaagataaaaaaacaaaatagaagtaaaataaaaaagcaaaatataggagcaaaattattataaaagagcaaaatattttgctcttttttttatttctcataagaaatattattttttatttatgaaaatacataataaaataattatagtttcaacgttccaataaatatttactttaattttaaagttggcacgatttatgctttaactaattattgagaatatataaatttttaggagggtgtatatatgagaaaagtaagagtaggaatatggggatttggagctatgggaataggtatggctaatatgattctaaagaaagaaggtatagaaatagtatctgtttgtagtagaagtacttcagggaaaagtatgtatgatgttttaggaattgaaagaggagaaagaccagaagttattatcaataaaaattatgaagaagtttttagagaaaaaagtgtagatgttgttttgttagcaactgattcatttactaaaaaggcttttgataaaataattttcttattaaatagaaaaataaatgttatatcaacagcagaacaaatggcatatccacaagctgatgatgcagatttagctaaaaaaatggatgaagttgcaaaggaaaatggagtaagtatacttggaacaggaataaatccaggatttgtattagatttactagtattggcactttcaggtacttgtgaagaagttactagtataaaagctaagagagtaaatgatttatctccatttggaaaatctgttatggaggaacaaggtgttggagtaacaagggaagaatttataaaaggtgtagaagataagactatagcaggtcatgtaggttttgtagaatcaataaatatgatagctgatggattaggttggaaattagataagatagaacaaacaaaagagccaataatgactacagtagatagaaaatctaaatacggagaggcattggctggaaatgttgctggttgtagacaatgtggatatggatatgtaaatggagacgttttaattgaaatggagcatccacaacagataataccagaagtagaaggtattaaaacaggagactatgtatcaataaaaggtataccaaacattgatttacaaataaatcctgaaatacctggaggagtaggtacttatgcaatgatagtaaactctattccattaataataaatgctagaccaggtcttaaaactatgttggatataccagtgcctagagcaataatgggagacataagaaatcagatagaagttgaattggaagaagaatcaaaggctaattagtaagataacagttagctaattggtaaaataatgtttaatttaaaataacagtaaattaattagtaaggaatagtcaattaataaggggatgaaaaaatggatgctaaaattaatgattgggttattatacacaatatagtattgactccagaagaaagagctccacaagttccagaggatactaagaaagtatccttagaaatgtgggttaaaggttttatacaaagtgatgcttctataggcgacttagtagaagttaaaacaattacaggtagacttgtaaaaggtaatttacttaaagtaaatccatattatactcatgattatggtaaatgtataccagagttactccaaataggaatccaagctaaagaaatattatttggaggtgtatataatgaataattcaacatcaataaaagatatgagttatcaagctgttatgggaagaaataacgaaataatgaaaaatgcaatcggattggattattcttcttttgaacaagagggaatagggtttgattatgagaaaatgatgagtgaaacaggatatacattacaagatattgaagcaattcaatcacagtatgctgttggaaatactcctctaatagagcttaaaaatttgactaaattagctagaaaatgtgctaaagaaggtaaaggagctaaaatatttgtaaaagatgaagcaatgaatgcatctggtagttttaaagcaagaagagcagctactgcagtatatcatgccaaacaaatgggatataaaggtgtaatagcagctaccagtggtaactatggtgcagctgtagcatcacaagcggcaatgcagggattaaaatgtataatagttcaagaatgttatgattctaatggtgtaggtcaacctgaaattatagaaaaagcacgaaaatgtgaggcatatggagcagaagttgttcagttaactgttggaccagagttattttatacgttcttagttttattagaagaaacaggctattttaacgcatcattatattcaccatttggaattgcaggtgtagaaactttaggttatgagttagctatccaatttagagaaaagtataaaaaagaccctgatatagttgtttgtacaaatgcaggtggtggtaatcttactggaactgcaagaggattgataaaagctggttccattaatactaaagtagtaggagcaagtgtagatttaaaaggattacacatggctagtgataatcaatttaataaaaaatcatttacaacaggacatacaggttttgggataccatactgtacatggcctgataggtcagatgtacctaggtctgcagctagaccacttagatatatggatagatatgtattagtaaaacaaggagaagttttttatacaactgaattattggcacagctagaaggtatagaaagaggtccagcaggaaatacatctttagcagcagcattctctttagctcaagagttagatgaggataaagttatagtggtacaagaaacagaatatacaggcgcaggtaaacatatatgtccacagcttacttttgcaagagaaaatggaatagatataaaatttggaaatccaagagaagaaattgcaggagtaaacttaatattaccagaaagaccagaattattgaaatgtgttgatattgatatgaataaaataagaaagtcatttataaaaaattgcatatctaataatcacattgataatattgataagctaagtaatcgagatatagaatttttaatggaagaagtaaaaagttcaagagattttgttgttgatgtattaaataatttatagtaattattgtttttttatttaatataaaataaaaattcggaaaattctattaaatcaatgcgaatggaggaatgttcatgaaaaaaagagaggatgattttgaagttagaagaaaacatcttcaagaactgagtgatgatgagttaaaagaaaggttttggaatttagctacccagatagtagaaccaatgatagaacttggtaaaaagaatacaacaccatcaatagaaaggtctgtcttgttgagaatgggattttcttctcttgaagtaaaacctattttagaaggggttatggaaagaggtcttataggtaaaggagcagggcatgtagtttataaattggctaaatctaaaaatataacggttagagaagcaggtttgttattagttaagggtgaatattgggatgaagttacatgtttatttagagaaggggtagaatcatgttaaaggaaaataaaaaattggatatagactatatattaaaagatttggataaatataaaccaaaacgaagaggttgggtttggagagaacacttggaaaatcttgaaatgggaccttttaaatataaagactgtacaaaacctttaaagaagagtgtagggctaccatcatctaagtatttcaataatatagaccctcaaccaagtccagttattactactgaaatagcttctggtagatttgaggatgatataagaagaatgagaatggcagctcatcatggagctgaccatctaatggttatcagaactgctggacaatcacattttgatgggcttatagaaggaactccacaaggtataggtggagttccaataacaagaaaacaagtaagagctcaaaggaaggctcttgattttatagaagaagaagttggtagacctattaattaccattcatatgtaagtggtgttgctggtcctgaagtagcagtaatgtttgctgaggaaggagtcaatggagcacatcaagacccacaatataatgttctgtataggaatataaacatggtaaggtcttttgtagatgcttgtgaggcaaagaaaataatggcttttgccaatatagctcaaattgatggagcacataatgctaatgctactgctagagaagcatggaaggtaatgcctgaacttatggttcaacacgctttaaactctatattctcagaaaaaataggtatagataaaagtaatatatgcttatcaacagttccaccaacagcacctccagcaccatgtttaagaatagacttaccttacgctgttgcacttagagaattatttagtgattataagatgagagctcaaatgaatactaaatatatggaatcatcaactagagaagcaacagttactcatgtattaaacttattaacatcagtattaactagagctgacatacaatcaactataacacctgatgaaggtagaaatgtaccttggcatatatacaatatagaagcatgtgatacagcaaagcaagctttagttggtatggatgggcttatggatatgatagaacttaaagatgtcggtgaattaagagacaaagcaagagaacttaaagaaagagctgtattatatatggaagaaatatctgaagttggtggatattttgaatctgtggaacaaggattttttgttgattctggaaattatccagaaagaaatggtgatggaatatctagaaaaataaaaggtggagttggtgaaggtactgtttatgaaagagaagaagattatttagcacctgtaactgctcactttggatacaataatgtagctcaatatgatgaaaatgctatagataatccatcaatgttaatagatggatgtacatttgaaaatccagacaaaataatatatattgatgagcttgacgattttgataatgtagaaaatagactaaaagaatcatatgagtacagaaatggaactaaaattaagcctgaaatggaatggtgtgcagatggaattgtaatgataacaatgatgcttcctactgataaaagaacagcagagtttgcagctttggaatttgtcaaaaaaatgaacttacaagaaattgaggtcataagtagagaagttatgcatgaatctgaagggactagaatagaagtgaaaggaagagttccgtttgatatagatttaaacaatttagtaataccagaagaacctaaggtactaactgatgaagaaataagagcagatatagaagaaaaacctatgaaaatagtttcagctacggttggagaagatgaacattcagttggtttaagagaaataatagatataaaacatggaggtattgaaaaatatggcatagaatgccactatctagggacttctgtacctgtagaaaaattggtagatgcagcgattgaactgaatgcagatgcaatacttgcatctacaataataagtcatgatgatattcactataaaaacatgaaaaaattacacgattattgtgtagaaaaaggtataagagataaagtaatgattgcgtgtggaggaacacaagtaacacctgaaatagctgttgaacaaggcatcgatgctggatttggaagaaacagcaaaggcatacatgtagccactttcttagttgaaaaaagaagagaaatgagtaataaataatggaaaatagcaaagtttctttaaaaatagatgtgttggtagctgaaattggaagtactactacagtggtaaacgctttccacgatattaatactaacaatcctatatttttgggtcaaggtcaagctccaacaacagtgtttgaaggtggcgatgtaagaaatggcttatcaggtgctattaaagatttagctaataaattatctgtagatgatatagagtataatgatatgtttgcaacttctagtgcagctggtggattaaaaatgactgttcatggattagtctatgatatgacagtaaaagcagctaaagaagcagctttaggggctggagctgttattcgtcaaataacatcaggtagaattaaaagaactgatttaaataaaataaaagaaataaacccaaacataattttaatagctggtggagtcgattatggagaaagagatacagctatttataatgcagaaatgatagcttctatgaatctaggcataccagttatatatgctggtaatgttgaaaatcaagaggaaataaggttaatatttgaagatactaattataagctttatataactgaaaatgtataccctaaaatagatttattgaatatagaacctacaagaagaatcattcaaagtgtatttgaagaacacataactacagcaccaggaatgaaatacattaaagaaatggttaatgaaaatattactccaaccccaggagctgtaatggaagcttctaaacttttatataaaaatattggagatttattaactttggatgtaggtggagcaactactgatgtacattctgttacagatggaagtgactatattaataaaattttggttaatcctgaacctactgcaaagagaagtgttgagggggatttaggtgtatatgtaaatatgaagaatatagtagaagttataggtaaagaaaacttacaaagtgaactatatatagatattgatgcagtaatagagaattatcctccaataccaaaatcaaaagaagaaatattatttgttgagaggttgacaaaagaagctgttgttaaagctatgctaagacattcaggaaaaataagaaatatctatggaacaactggaaaagtcaaaattgcagaagggaaagatttaacagaagtaagatatatagttggtacagggggagcacttactaggctccctagtagaattgaaatattagataatatgctcaaatacaataaaaataatgaattactatttccaaaggaaaaaacaaagatattaatagataatgactatattatggcatctatgggtgttttatctaaaaaatatgaagaagcatctcttaagctcctgttaaaaagtttgaattttgaggaggaaagattatgtatcctaggttagaaatagatatagaaaagttaaagcataatgcaaaattaatttcgcagatgtgtcatgaaagaagtattaagatatcttttgttactaaatcattttgtgcacaaaaagaaatagtagaagaaatatgtagtgaaggaatagaccatatagcagattcaagaatacaaaacttaaaaaaattacaagatataaatctacctaagatattgattagaatcccaatgttaagtgaattagaagaagttatcaattattgcgatattagttttaactcagaattagaaacaataaagaaattaaatgaattatgtgaaagtaaaaatattattcataagatagttcttatgtttgacttaggcgatttacgagaaggatacttttatgaagaagacttttttaataatgtaagagagatagtaagattaaaaaatattgaaataattggtatagctacaaacttaacctgttatggagctattataccatctagggaaaatataggcagactggtaagtatagcaaaaagaatggaagaaaaatttggaataaatctagaaatagtatctggaggtaattcaagttctattcatctgttgataaataataatatgccagaaggtattactaatttgagaataggcgagtccattctacttggtagagaaacggcatacggtgaaaatataaatggaacatatcaagatgcatttaaattaatatgccaagtagttgaatgtaaagaaaaaccatcagttcctattggagaaataggagttgatgcctttagaaataaacctgtttatgaagataagggaatcttaaaaagggcaatcatagctataggtaaacaagatataaatattgactctttaattccaatagacactgatataaaaatattaggggcaagttcagaccacatgatactagatgtaagtaacacaaaatatgattataaattaggtgacaatttagaatttttattaacttatgggggtatcatgtcatctagtacaagcaaatatgtttcaaaaaaaattatagtgtagtgtttaaataattaggaggaaactattttatgaaagagcgagaatgtagaaaagcaagtctgtttgatgcaatgataccaattacttgtttgatattatttttaagtctaggagtattagtgtatggttcatcacctcatgtaccactaataggagcagcagcagtagcaggacttgtggctgtatatagacttggatttaaatggaaagagttagaattaagtatgtttaatagtataaagatggcaatgcaagcaatcttaatcataattataataggcgtacttataggaacttggatagtaagtggagtagttccatgtatgatttactggggactaaaaattttatcaccaaatatttttttagtagcatcaacattagtctgtgcaatagtatctcttgcgacaggttcatcttggagcacaatgggtacagtaggagtagctcttttaggaattggtcaaagtttaggtatgccaattggattaatcgtaggttctataatatctggagcttactttggagataaactatcacctttatctgaaacgactaacttagctccagcaatggcaggaacagatttgtttacacatataaaatatatgttatattcgactataccatcattattaatttgtttagtaatttatggtgtaattggaatgaagtattcaggtcaagcactagatataaaacaaatagaattaattaggtctacattagattctacatttaatactttatcaccagtattattattagctccagcaatagtaattggattagttgtatttaaagttcctgctataccagggcttatagtaggtgctgtattgggagtattgtttgcagtagtttttcaaggagaatctatgaatacgatattagatgcagcacaaaatggatatgtttcgtcaacacaaatacaggaggtagatgctttattatctaaaggtgggattatgaatatgatgtccactgtatccttaacaatatgcgctttatctcttggaggtattttagaaaaaacaggtatgcttgaagtagtagcatcttctttactaagattagcaaagggtgtatttggaacagtattatgtactatggtaacttgtacaattaccaatataatagcaggtgaacaatatctatctatagttataccaggaagaatgtataataaggaatataaaaagagaggtatacatcctaagatgttgtcgagagctttagaagatagcggaactttaacttctccattagtaccatggaatacatgcggggcgtatataacagcaacattaggtgtatctgcactaacatatggtccatacgctttattaaatattataaatccaatagtatctttagtattaattgcatgtaagtttaaaatagcaagaatagaagatgaacctgaaacttgtttaaattttgatgtttgataatagataacttatgtaagaacgtaggaactagggggggagcctgtggggaattagtaagacatattttagtgtgcgaaattctataaatcagtaatcttgtgactttagccatgggaggttcagattagtaaatttatagttttatattagtctatactttgatcttttaattgtttgtataaattttttatagaaaaagatttcttttagacttgcctaaaaattaggcaagtcttttaagtatgttctgattataagagcactgtgtgacaagaatgatgagattatttttgctatactttcgatataagaaatggaaggaggttatgttttatatttatatgaaataattagttacacagtgaattttcgtataatttggtataaaaagattagaaatgaaaataaagtaatggaggaataaaatgactagaatatccaatataacaatagctgaacaatctgagtactgttttttggcaatacgaaaaacaattgactttatggtagagttttcagagttttcaaaacaaagttttgaaaaaatttctaaatatctggaggagagaggaattttatcttcaggagcaccgattgtatgttttcataacatggatttagcaaaattggatgttgaagtagggtttcctgtagccacttatatagatgggaaaaatgagattctacaaaggattgttcctgcacagaaaataataactgcaattgatttaggaccttatgaattacaagaccctactttagaagacttattttcatgggcaaatagcaatggatataaacttcatggcgatatatattaccagtatttaaatgatatcaatcgtccagctagtgaatatcttacgaaaatgatgttacccattatatagaaagttaaagattatcgtttgttagttgataattagaagaacatttaatgctactgcataaattttatcctaaataatatcaaggtgatttaatttatgtattctaatgtaactgtagataatcaatttataactaacttagtgtaatttagatttaatttattattctaatgtaaccccaatatattgttaaggtctacttaagatgctcaaaaggctatgcttaatttattgttatataatttgtagagtggtataatttagaagtgatactatatagatatatagggggaaaatatgaaaatatatgatatattaacacgtttttatattcaagatatagaaaaagccatacctttttatgagaatcttttaaaagaaaaatgttctttgcgtttttcttataaagaagttgggttggaattagcgcaaataggaaatgttttactattatctggttctgatgatgctcttaaaccatttatagaaacaaaatctacttttatggttgattctgttgatgaatggagaagttatctattggataatggagcagttgtagtaagagataagaaaaaagttcctacaggatataatatgacattgagacatccagatggtacaattatagaatatgttcaacatacaaagcaggattagttaaaaatagattttactactgagcaactaattagaatctattcttagacgtacaatttattatttttggtattaatagattataagtcaaattataatatttcaaaatagaatagaaatttatttacataaaagagagtgtttaaaaatgaactttttagttcacgaagcactcctttttgtatgaaatcaaatacatcaatatataaaacaaactgatgaagagcttaaattaaaataaaaagattcataacaggaccccattaaactttaagatagggtaagtttgtaatcatattaaataattgtaaaaagctgtttttagtcgtataatataaatatttatcatttaattaaggaatctaaaaggaatctaataagaagaaaataataaataactttttagatttactaaatgaaaaattattgaaaattaaaggattagagtctttaatcagaaagtaaaaagtaatatattaaatttatgaattgaaaacttaaacaacaaatttgtttataaaatagcaagattcattaaatataactaagtaataattgatataatgttgcatggataaaaggagggaagctgcaatgtcttacaaagtaattaatgtcataactgctattgactatatagaggagcatttatcagaaaagctggatttagatataattgctaatgctgttcattactcaaaatatcacctgcatagaactttcacaacttctgttggtctaacaatgcatgattacataaagcggagaaagttgacagaagcagcaaaattattggtattttcaaagaaaccaattattgaaattgcattgatagctggatatgaaagtcaacaggcattcacttctatatttaaagctatgtataaaaaatctccaaataaatataggaaagaacaagaattttatcctttgcagctaagatttgttttgaaaaaagataacctattttcaaagaatgtactagagttggaaaaagaaattaaacttgcaagtatgtctgacataccattatggatgaatttagtgagattagtcatagatggatttccaaatttgcaagaggaagaatatatatatcaattagaacagtatattttagaagaaagagctttaatattaaaacttaataatgtcgctattgcaaatatggtgtttaatagagaaactagaagtattgatttttttggaatacatccacagtatcgtaattcagacattgcacaagtgtttttgaagaaagttattgaagatttcttgatagatacagatatctcaattactacctttcgagagggtgacaaagctgatacaggacatagagatatgataaagaagttggggtttgcagaagcagagttgcttgtggaatttggatatcctactcaaaaatttattcttccttgtgtagaagaaagagataatagacaaaattaattgtagattaaatgcaaagtttaccacatattttttgtttgaattattttatatataagagtatttctgcttttaatgtattttgcttgtaagtgtacttatggtaataaatatagaaagatttagttttttaaaaaaagaactttaaagctaaaaagctaacatttaagttaaatagcaagaatgattaaaaactccaaaacacaattaagtataatgattcagtgtaagtacttaattaacaaaggaggatttaaatgtctgaaaataaacaagtagtaaattgcgatattattgcatccaattctaaacataatatgtgtgaacatgatgtagagttattaactttttttccagatgagattgcacatctaatagagataaataacaagctagacaatgcttttaagaaagctgaaaatcttgttgacaagcttgataaggattatatggacgctaaaatgtatatggtaaaaaatcgtggtgaaatagacccacatgaaatgtttcaaaatgaacaaggactaaaacaaatagataactatggggcttttatggtaaaagttcgagataagattaataaaatcaaagattctccatactttgctagaatagattttaggctgaaagatatggatgatgaatctaagtattatattggtagatttgcatttgattatgaagatgagcttataatacttgactggcgttctccaattgccagtatgttttatgattatgaaatcggaaaagctggatatgatgctccaataggatgggtggatggagaaataacaagaaaacgacaatttaaaattaaaaatggaaaattggaatatgcactagaaagttccattaatatacaagatgatattcttcaaaaagaacttagtcacacttcagatgaaaaaatgaagtcaatcatttcaacaatacaaaaggaacaaaatcaaattattagaaatgataaagctgatacactgattattcaaggggtagctggttctgggaaaacatctatagcattacacagaattgcttttcttctttatcgatttaaagataaaatatcagcaaataatgtaattatcctatcacctaataaagtctttggagactatatttccaatgtccttcctgagcttggagaagaaccattatgtgaattaagttttgaaaatatagcagaggtacaattagatagagttattaattttgaaagtgagaaagacccattagaaataaatgatgctaaatggtctgaaagagtgcgttttaaatctacacttgattttgtaaaacttattgatgattatataaaacaaatgccaaataagatttttattccaaaagactacacttttggaagttttacagctaaaagtgactggatacagagtagatttgaggcatataacagatatccagttaagaagagattagaaaaggtagctgaagacattcattataaatttgaatcagataatattatggaagaagatttaccaaaggtaaaaagtatacttaaaagtttgaatggaatgttgacaataaaaaatactcttacactatataaggatttctttaaacaaatgaatatatcaaacatgtttgtgatggcagaaaagaaaacacttgaatggtcagatgtatacccatttatatatattcatgctgcatatgaaggtatacaagaagataagattataaggcatattgttattgatgaaatgcaggactatacacctattcaatatgctgtaataaacttactttttaagtgtaaaaagactattcttggagattttggacaattggttaatcctaatcatactcatacattagatgatatgaaacagctatataatgatggggaactagttatgttgaacaagagttaccgttctacttttgagattattaatttcgccaaaaagattcaagatatatcttcattagagcctattgaacgacatggtgaagaaccggctttattaaaatgtaataacgagcaagatgaaataaataagataaaaatagaaattgaagaatttaaaaagagtgataatgcgactcttggtattatattaaagacagataatgacgctaaagctgtatatgatgcgttaagagaagaatatagtgttcacttaatatcttctgaaagttctagctttacaaaaggagtatccataacttctattaaaatgtcaaaaggtttagagtttgatgaagttattgtaccttcagtaaataataaaacatattatagtgattatgaccgcagtttgttatatattgcttgtacacgagctatgcacaaacttaagttaacatatgttggtacattaactcaacttataagcatgtagattatatcttatatgcatttattatcgtaaatataaattgggacaaagattcatcaataaatcaacaaaaaataatacttataaatttataaaaaatgaaagctataaattacatttgaaattttataaaattttgtgatttatagcttttataatattaatttcttttaaaataaagttaaactttaaatttatgaaataaaacaaagtagtaatatatatgtaatagttcttaattttttaatattagtattatattatctatatatttattgattttctaaggaaatctgatgttatagtgcaacctctttcaaacatttctagtggtgtaccttcaaatacgacctgaccaccgtttttgccaccatcaggaccaatatcaattacccagtctgcttgtttcaatacatccaaattatgttcaattataattacagtattacctttatcaactatatgctcaaaaatcaacataagcttttcaatatcagaaccatgaagccctgtagttggctcatctaaaatatatatagtaccttttttgttgaggtttttagctaacttaattcgttgacgttctcctccagatagtgtgctaagtggttgacctaaggtcatataaggtaaaccaacatctttcattgtttgtaagattttacatagcttcttttctgtaaaaaattcaagagattcatctactgtcatagatagtacatcaactatacatttacctttatataattttgacaaaacttcttcactatatctagtacctttgcaagcttcacatgtattaataatagggtccatgaatacaagctctgtaacaagtactcctttaccatcacaaacaggacaagctccctttgaattaaagctgaataaaccttcttcaacattattttctttagcaaatacttttcttatctcatcaaagaaaccaagaaatgtagcaggcatagaacgatttgtagctgtaactgggctttggtcgattttaataacatctttttcgtatttttgtgcaaaaacacgagagattaaagtactcttgccagaacctgctactccagtaacgacagtcataattccaactggtaaatctacatcaatatgttttagattatttatgcaagcatctctaattggaagggtaccttttggatgacgagagtcagtttttataggtaatgatagattcattgcatttgaagtaagagtgtttgctaaaagtaatttatcataagagccttggaatacaacatgtccaccctgagtaccagcacttgggccaatatctataacttcatctgctatggagataacatctttatcatgctctactacaaggacagtatttcctctatctctaagtttttttaatagctgattcatacgatgtacatctcgtggatgcataccagcactaggttcatcgaaaatataagtcatacctgtgagactgctccccatatagcgtacaagttttaatctttgagcttctcctccagatagagatgatgattctctatttagatgtaggtaagggagaccaatatcaatcattctttttaaaccatcagtaagagtctttattacagtttcagttcttttatcttttatttgtaacaataaatcataaaggtcagtaagttccatattgcacatatctgcaatcgaatatcctaaaatattacagttaagagtttctttatttaatctttttccatgacatacaggacattccttatctgttataagtctttctgatttttcttttgtgtgtttgctcatattgctaatatctcgatttagatatgtttgattgtatttgttaaaaataccctctatttttggattttcttgttttccatctttattttttgaaccataaagcaataaattatattcttcaaaagaataatcttttataggtttatctaaatcaaaaagtccagactctgcatactgcttccagtaccatgaattaggtttaaataaagagtcatttatacatcctgtattccatgaattttcaggatttataatagattcaatattgattactttaactctaccaatcccagaacaatttttacacataccatttgggtcattaaaagaaaaatatgaagttgttcctatgtagggttctccaattctagaaaataataatcttaatgatgaatacaaatcacttatagtgccaactgtagaacgtgcattgccaccaagaggagtttggtctacgattacagaagcagttaaattatcaatcagctccacctgaggttttctatatttaggtagcctatttctgataaatgaagaatatgtttcattcatctgcctttgtgattctgctgcaattgtatcaaatacgatactggattttccagaaccagaaactccagtaaaaacaacaattttatttttaggaattttaaatgatatattttttaggttattttgtgtaagtccttttattataatatttgacatgaatgttaaatcctttctgagtacattttagtaaagcaattatattatgtaaccatattataataaaattaaaatctactttcttgatatattctgctatgttatagaaggtatttctaaatttaaccaatcccatacaatctgaataaatgatagttgataatagataaaaaagtatataatagatactcgtaatttgataagtacaaagataattatacaattaaaacgacttgacatttaaaacttactattgtaatatttaaatattacaatagtaagttttaaatagagaataaataattacctcacaaactgaaaggaggacataatgatactaatagttatattgagtatattcatcatagcctcaatcaacataattatattaggtaaagaaaatataagagatatagttatccctttaactctatttattgtaagtgattttttatttttgtgtggaaatataatatgtaggggaggagtaatgctactatttataggtttatttgcaataccattgatgctaattgcatttatatggatttgtgtacatatgattaagctttactataaaaaagatttaaataaaagaaaaatgattggatgtatatttagtatctttataagtataggtactatatttattcctagtccaagtgaaagttttagatttaaactttatgaaaaagattatagtgtagtagctaaagctattttgaaagtttatgatgaaaaaaagttaagctctgaatctgtcttttatattcaatctgataaaaatgaattggagaagatattttctaaagaagtaataaaaaaaatgaaaaaactaaacagaaatttagatgtagttaaaatttctgggaatagaaatttagtctattttttctttggagctgaattacaatctattgatggtattgtgatttttaaagatttaaaacatgttaaaccaaagttagattttataaatagaagtattcaagctcctagattggagtatattacaaataatgtatattattttaaaggtgaactataaacttatgtagaggagatggtataaagtatgaaaagaaaaaataattttatttggatagttattcttctagttgttgtagctatgggagtatattatgtaggaagaaagcataacaacacaaaacaaaaacatgataagaatcatataaactctgaattaaataaatccaaagttgaaaacaatgataaaaacaaaaaagaaaaaattaatatggttgactatagtgactgttttgaaggtattagtggaggagctattttttataatactaaaaataaagaatataatatatataacaaagaattaattgaaacaagaaggtcaccatgttctacttttaaaatagtttcaactttaattggtttagaaaaaggggtaataaactcaaaagaatcagttatgggatatgatggtacagagtatccaaataaaaattggaataaaaatcttagtttagaagaggcatttaaggagtcttgtgtttggtactacaaaaaattgatagataaagttgatgctaaatctgtccaaaacattttagatgatttaaagtatgggaattgcgatattagcgaatgggaaggagatttaaaaaatggaaagggacatttaaatggattttggttagaatcttcattacaaatatctccaaaagaacaagtgcaaacaatggcaaaaatatttgagggagatacaaactttaaaaaagagcatattaatattttaagagatattatgaaaatagatgtaaatgataaaaacataaatgtatatggaaaaactggaacaggatttgatgaaaaaaataaacgtgtggatgcatggtttgttggtatgctagagcgtgaaggtgacacctattattttgctattaaatcagatgattccaataaagaaattacagggccaaaggtaaaggaaattgcaattaatataattaagaaatattatagtgtaagggaataaacttaattttatttgtaaatattatttacctatagtctgtaatatttattaaataattttactaaattgagtctatatagagcaaaactcctttagtacataaaatacttgctattgattattaaattgaatacctatagatttaaagttaataccttttaaagactatgtaatatattaaaagtataaataaaatatattgcatagtttttgttttatattataattttaaataatgtgcaaaaactaaacaatatttttaatagtaatttatatttgtattcatgtcactataatgtcattttaggttgctaaaatttaaccataaaggagatgattgtatatggaaatattaaaatgtgaaaatctcacaaaaatatatggttcaaatcaaaccagagtgacagcccttaataatgtaaatttatcagttcaaaaaggtgattttgtatccattgtaggagcatctggttctggcaaatctacattgttacatctgcttgggggagtagatagacctacatctggaaagatttatgttgaagatacagaaatatcaagtttaaaggaagaagctcttgcagtttttagacgtagaaaagtaggtcttatttatcaattttataatcttatacctacccttgatgttagaaaaaatatattattacccatgttacttgataaaagaaaggtggatgaggatagattctctgagattgtatctatattgggattatctgatagattaaaccatcttccaagtcaactttcaggtggacaacaacaaagggtatctatagctagaagtttaatctatagaccagctattttattagcagatgagccaactggtaatcttgatagaaaaaattcagaagaaattgtagacttgttaaacttatcaaataaacgatttaatcagacaatacttcttattactcatgatgagaaaatagcactagaggcaaatcgtattgtaactatggaagatggagtgattgtctctgaaaaggtggtgaagaaatgaatattcttcaagaatacaccttagactttgtacgacgcaataaacgtagtagtatagctataatgttagctatattacttactacaaccatgatgtcttctttgtgtggactgttgtataccatgtggacagattttataagactttcaattgagaaagaaggtaactggcatggtgaattgtttgactatacttatggaagtgacttaccattaattgaaaatttttcttcagttgatgatgtaatggtaaaaggacaatggtatgtaggcaaaattaatgatgagaaaagagattatataatttatagaaatgctacatcagagtattggaattctatgccagaaaaggatactataatagagggtcgtcgaccaaataatgctaatgaaattgcattatcaaaacaatattttgagaataatccaagtgtaaaaattggggataaaattactcttccaataggagatagaatcctaaatggaaagcctcttgaacccatagctcaaaaatcgaaaggggaaagttttaaaaaaatttcagagactacattgacaatagtaggaaaggtagatgtttccacttcatcagtaatacctgcatatacagctcttggatatcttgatagaacaagtataaaacctaatgatagtataactgtgtacttgcgatttaaaaatataagagacacatacaaggaacttccaaaacttgctaaatcattggggtggaagactaatgaatatggaaaatacaatcttaaatataatagtaattatcttttaaaaatgttagtcttttccccagaacagaaagcatctatgagcagtatatcaaaattttcaactcctattatgtatcttacaatagcaatttttacagtagctgtgtttgtaatggtgatttacaacgcgttttcactatctgcaaatgctagacttactcaattagggatattatctagtgttggtgcatcaccaaaacagattaaaatgtctgtagtgtttgaaggttttttgcttacaattataccattgccaataggtttatttttaggatggttattgtgtaataggcttatagtttatattaattcagttaattatcatactgatgttccagaagtggtatttacttatggtattcctgcttttctgccagcagttttacttacaatagtaacagtctggatttctgcacttataccagcacgaaaagtatcaaagatatctcctatagaagcaatacgacaaggagatagtgttaaaatcaaaaagtcgcataaatattcattaggaaagatatttggaatagaaggagaacttgcatcaaacgcactacgtgctcgtaaaaaatcttatcgtactgcaacaatatctttaacattatcttttttattacttacatgttttttgcatataattgcaaatcaagaaggagcaaaagctgtttatggaagtgataattataaggaccaaagagatatagcagtttatttggaaaatagtgaacctgtagagtctgctttcattgaaaaattagataatacagaaggtgtaaaaagttcactatattatcaaaaaatgtctgcttccacttggctgactgaaaaagatgcatcaaaagaacttgcgaaaaatggaggatttaaaagtatagtttcatctaaaaaatactctcctatagaacgtgatggcaagtttcgtataatttcaaatataattgggcttgatgataagagttttacagaatattgtaggcaaatttctgtagacccaaagttattttatgatacaaaaaatccaacctcaattgtatataataaggaggaagatattaatcgtagtacacgtagaaataaagtatatatagattatttaaatctttcaataggagataacattaaattaaatgaaaaagtatatgacgaagataaaggggattatacttacaacatgaaagtgggagctattacaagcacacttcctaaaacagtagatactagttcaaaatatacattaatgcaaatagtgccaatgtctatggtgcaggaaatatctaaaaattatgatgaagtaagtaggttacgttcaaataggctgataggagtatttaaagtaaataatcgtgaggacattcctagagtaagagaaaaattagagtccatttataataaagactatggttcaggagattatagtattgaggatgttttagaaagtgaaaaacaaaaggctagtggaataaagaccatgaatttaatagtaggctttattacaggtttattggctatgattggattatcaaatgtacttgctacagtgtcaggaaatactagaagtagacgacaagagtttgctatgttgcgttctgttggattatctccagaaggcataaaaaagatgcttgttttggaaggtttgttcttaggaattacaccattactacttagtattcctgtgcaaataggaatagtgtatgcttttctacgtataaatgaaatatattttatagagtatttaccatttgcacctatatctacaataataggttttactatattgatactttttattgtaatagcatcatatatgacaggatacaagcagttgaagaatgaaaatatagtagaatctataaaaaatgaaacaatataaacaaaagctatttgaacttatttaaaggtttcgatttaagactacttacaagtatagggatagttaatttgtttgtttaataaaaccttaaatgtaaatagaagtatattactaaaacaatagataacatagaatatagatatagctggattataggtattttacctataatccagcattttatgtgtaaaatttaattatgaatcttgcaccaccattatggcaattttctgcatgtagagtaccattttgacgttctataatagactttgatagagcaagccctataccaatactgtccttactagcatttttaccacgataaaatctattaaaaatatatggaagttcttcctgagcaaaccctttaccattatcttctatgataatctcaacatatagaggattttgactataataagcaactatatatccaccatcttctatatgctcactacaatttttaagaatatttaaaagagcttctaaagtccaattaatatcgatttcaaattctaccgaaggagaagcctcgatagtaaatgtctgatgtttttctcttaaagaaccttctataggctcaattgcataagtaagaagagaatgtacatctataagtttgctttcaaatattaaagtacttgcatccaattttgataatgtaagtaaagatgaaactagtctctcaagtcttgagatttgatttgtaagtctgttaatataatctatttcttcatctggacaattttctgaaagtaattgtgccataagtgacatagaagtaattggagtcttaagttgatgagcaatatctgcaagattatctgaaagagtttgtctttcttttaaagcaaattcttttgaacaacgaagttccccaactgttttatatatctcatcttcaaggtgagaaaattcatcttcacatcgtaaaagtacagactcttttcctaaattcacttcttctaagtattgagtaagattgtttattctactcagtttttgcttatttgttctatgtttgattatatatacaactgtagccattgttgaaattataccaaacgatatcactagaaaataaaaaaagtttttactccaaaatgtacttttagaatatccatgttttgataaaatttcatttcctgttttaaaatccttatcactagaatttttcagtgattttagtatactttctgtagacttaggattgtactcatatgatgcaccaagagccttagacagtacattgtattcattaaaagaagttatagttgttagaattacacttaataaaaaagttataattaagcagaatattataaaaacaactgtactgttgatatttcttggagttttcactagctgtcctccattctatatcctatgcctcttaatgtttttatacaaggtggattttttaatttttctctaagacgctttattgtaacagtaagagtgttatcatttacgaaattaccatctacatcccagagcatttctagtaactttgtacgggtcatagctctatttttattttccataagacttagaagaagtttatattctcctgctgtcaaaagtacttcaacattatctaaatatgctttgacttcaactttattcaagcttatatttccacatgtaatagtattgttagtatttgaatgagttcttctaagaactgcattaattctggattgaagtactgagagcagaaatggtttaaccacatagtcatctgcacccatatctaatccacgtataatgtctttttcatcatcacggactgtcaaaaatatcactggagtatcttctatacttttaacatattggcaaaactcgtatccaataccatcaggtagatttaaatcaagcagaattaaatcaatagttttatcaaaattttttttagcttcagcaatcgtattataacaacatacagtgtgatttttcttttcaagggaagtttttattccaaatgtaattgtatcatcatcttctaaaagaagtattttagccatttacttttagtcctttcagtaatttagttatttcattaactaagttattagttttatgtttaatattttttatgttagagatagaagttagagatagaaaaaattatcatttaagtatataaactttaatttataaacttaggtttatgctttaattgaatctattaaaagagcaagagttgtttcaataaatttttcctcatctatattaaagttgttcaggtatgactttcctgttacagatagtaaattaaaaaatcctgtaagtgtaaatattgatgaatacatgagagtaggtatttcaatatcatgcctaatacttctatcattttttccaatttcaaacattccttgtatttcatcaaacataaatttattaaaagaaaaaaacttttctttaaacagcatatcagtatccgatttttcagagtttacaataccaatcattcccataaggcataatagagaaggttctacagagtaaaatttatgaaaagcaaagtatgaaagttttattttttcaaaccctgttttgccttttgcactttctattttaacattatcccaaagtcttttatatcctcttaagacaacagcaaagaataaatcttctttacatgaaaagtacttgtatatggtgcgtttagtatattcaacttcttttgccaactcattcatagttgtattctgaacctcccatgactaaagtcacagggttcctgcttcatagaattttgcatactaaaatatgtcttactaattctccacaggccatccccgtagttcctacggttcttacataagttatttattttgaatcgttattagtcttaatccttcttttaatatatttatacttgcatttatatctctatcgtgagtttcattacaactaggacaaatccattctcttatatttaagttcttaacttcctcgtttttatacccacatttattgcatatttgtgaacttgcaaagaatttacctactttatacaatttgtctaccataccaattagccttgtattctaattgacgaataaattctgaccatgatacatcagaaattaagcgagatagtttatgatttttaatcatattctttacttgtaaatcttctatgcaaataatatcattctcttttattaatttagtagataatttttgtagaaaatcatttctttgattagctatatgttcttgaagtcttgcaacttttaatcttgctttatttctatttaaactaccgattgtctttctcgataattctctttgtaatttagcaagtttgtttaatgacttcttaagatacttaggattttctataaattctccacaacttgagatacaaaattctttgattcctaaatctaaacctgtctgattgttagtattttcaaatacttcaatatctacatcagtacagcataatgatacataatatctaccacttggttctttagatatagtagcattaagtattctaccttgaggtacttgtttatcccttatcttaaccataccaagtttaggtagttttatatgttgaccacaatacataatgttcccatttgtaaagttagttttatatgaaaatctattaattttctttgatttaaatttaggaaatcctgccttttctttaaagaatttttcatatgcgttttctaaatcttttaaggcgttttgtagtgaaaatttgtcaggttctttaagccactttaattctttttttaagttggtcaaatcagaactacactgtttataagtaaaagtttctttatcgtttttataaacttctattcttttagcaagatacttattatatacaaatctacaacatccaaaagttttgttaattaactcttgttgttttttatttggatacattctaaacttataagctttttccactactaccacctcactttacttgttttttctgattattaatatattttcttatctgctcctctgtattttctgatacagtagcaacgaaataactaggattccaaagatgtctccccataatacggatgtctgtatttgacatactatatgcatatcctctaccatgagtaacttccatttttcatcacctatcataatattaaaatatgcaattacttaaaacaagtattttgaaggttttttatatttatttttaaataacatatataagaaccgtaagtcttaacttttatcatttttgaggttgtcgttcacataagttcgctactacctatgcagttctcttatgaacttcttacactttcatgcaagcacagactatatcttatccttcggcattatccgttaaggtctacccacttccactaccaatagcttgtagtgtacttccctcaagaggaatagtcgttgaagtttctcctattcggagcttacctgctgattgcccattttaaagtacttaggatttaaccttataccatctaaccaattttttctactttcgtaactttcacacttaggtttatttcatccttatgttttagtttggttagctttaggggtttccagcaattcaagtagtattggataggtgttatcctatctctacatataggtttccctatatgctgactattttagctactaactcatgactaaagtcacgagtgtgcgtagctattttttaatcaaatccattaagacaaaataatttttctgccttatcaataatctcattttctctttgtattttttctttatctctttttgataattctgacatataaattattcctttctattgataaaaaagtatactgatggtatacttatgtaaatataatatttgtatacctatagtatactttaataaaaaataaaattaatatcaagtattataactatttataactttattaattaattatataggtaaaataccaaataaggggaatttatttatgaagataaaagaaaatgtattaatgttagatagtactcgtggttcaaattgttttattgtgttcgataaagaaattattcttatagacacaggtcttccttttatggggaaaaatataattaaagaattaaaaacacttggcattaaacttacagatattaagcatattttattaactcatcatgatgttgatcatatatctaatattaaattattgaaagagaaaacaggagcaaaggtatgggctcatgtagaggatataccttttattataggagagaaggatagacctgggtttaagaagtttattggaaaggcaatttccagaaggctcattaaggatgttgaaccttatggagagaatatgaagattgggaatataaaaattatccatactcctggtcatactccagggcatgtctgcatgatttttgaagatgtattatttgcaggtgatttagtcaaaaataagaatggaaatatagttccttatcctaatccatggaattgggattataaaaagatgatgaaatctataagagaattggataatttaaaatatgaatggatatgtatgtctcatggaactccttgtattaaataataaaaattaacatggattaatagaggcatagttgcttgtatgtatgataataatttacagcttctttttaatatatcatgtatatttgtagctgtaagcatatttataacaatacttataattttgtattttaacatctataataatagttttagctttgttaactatgaaatttacttaaagaagtaaatattcaagtaatagtaattattaaataagataaaaaataaatggcagatgaattaaagtaatttctaccatggaaaatacttttgagttagaaaaaactctattttagagtatgaagagatgaagcttccgaagaaagcaatatctaaagtacatgttcgaaaggataagtactttttggtgcctgcttttagcaggttatttttattttaataaaaataaaatcaaatgattattttatccttattatttaagactcttcactagaaaaagcaactaatgtatattaaaataatatttagggagtggaaaaaatgagattagaatcgttagttaaccaaagttataatagtttaaatgaaaatgataaaattattattaaacaaatattgatttgtcaaagagaataccgtaatttttcgtgtgaaaaaattgcaaatgaatgtaatgtttctagagctactttattaaggctttgtagaaaaattggattagattcattctctgatttaaagtatttacttaaaaataatcaactagaatttgttaataatgataataattttcatgatgtttgcgagaattatcgactattaatgaatgaattacaaaaaatatcatttcaagatatttgtaaaataatatatgatgcagaaacaatttatatttatgggacaggtaatgaacagaaaagtttagctcaagaaataaagagaatatttctttcagtaggtaaatgtgttattgacttatttgatataggtgaaattgaatttatgagagaatcatttcaaaaaagtgatttatttattatcatttctttgtctggagaaacaaaatcaggaattgaaattgcaaaatttatcaacaatcatatacatacgatttctttaactaggcttgataataatacaattgcaacactttgtgagtataatctgtatgttgaaactcaaaaacttgatacattacaagctatatcttatgaagtcgtaggagcattttatgctctattagatttgcttcatatgaattacatagagtatagaaggagaaaagaatgaaaattgaaggacttttcaataaatattataattcatttacagcaaatgataagtatatctgtgagtgtattcttaatcataaagaagattgtattaaactttctatagatgaatttgcagacaaataccatatatctacaagtgcactttctcgttttgctcaaaaactacaattacctggatatagtgaattaagagttattatacgcttaaatgaaacagaagtagaatataaaaatcaaagtaaacaccaattaatggattgttataataaggtgatagatgatatagagaagaaggattgttcgattatgtttgaaagaatgaaaaaggcaaatcgtataatcgtctttggagaaggttattctcaggaaagagttgttaaagagatgaaaaggattttcttaccaacagggaaaattatatatgatgtttatggttatgatatgattcaggcgcttaatcattttataaaaacagatgatatgattttctttatctcattgaatggagatacatctacaattattgattttgctaaagaaatgagaatgaaaggaacttatatggtttctattacaaaaatgataagtaatcctttagcaagattatgtgatgaaaacctgtatattcaatctatatctatttctgtagataaacaactggactacgatgtaacaacaccttattttattttaattgaactgctttatattaaatacaagatgtatttagaaagtgaacatattccccgaaagtgaaaatttgtgctaaaaatgaacatattttttaaaagatatcaaaatattgatatctttttttttgaatgctattatgattttgatagtaagaaaggaagatgaaattgtacaaattattaatacttgatatagatggtacgcttagggatgaggtatatggaatcccagaatctgcaaagcacgctatacgtttatgtcaaaagaatcattgcagtgttgttatttgtactggaagaagtataggtacaatacaagatgatgttttatcattaggggttgatggatatattgcaggaggaggtaattacattcaatatcatggtgaattactttataatcaatcttttaatcaaagattgataaaggaagttgtttgtttgttaaaaaagagagaagttgctttttcgattgagagtcaggaaaaagttttcatgaatcaaaaagccaaagaaatatttgaaacaatgaatcagttgaaaggaactaattcttgtataaataaacaacatatccaagaaaaaataacatatgaaaataatattgaagagtataagtcacaagatgtacataaaatttgtttatggtcaaatgaaaaggtatttgacgaagtgaaagatatactacaagataaaatggaattagcacagagagatatttctagtcagtattatgaaattattcaaaaagattttcataagggcaaagcaattaagagattacaagaaagattaggggtaactcaaaaagaaaccatatgttttggtgatggtcaaaatgatattgtcatgtttcaagcatcagacgttacaattgcaatgaaaaatagtcatcaacaacttaaagatatagcgacatctatatgtgaggacatattcgataatggaatttataaagaattaaaaagaagaaatatcatataaaaaggagtaatttatggaaaagaaatggtggcaaaaagaaatcgtttatcaaatttatccaagaagctttcaagatagtaataatgatggaattggagatttacagggaattatttctcgtttagattatttaaaagatttaggtattacatcattgtggttatgtccaatttttaaatcacctatggacgataatgggtatgatattagtgattatttagatattgcaagtgaatttggaagtatggaagatttaaaagagttaattaaagaaagtaaagatagaggaatcaaaattatattagatttagttcttaatcatacaagtgatgaacatccttggtttcaagaagcattaaaaaatccagaaagtccttatcatgattattatatttttaaaaaaggaaacgatttaccaaataactggaggtctgtttttggtggaagtgtttgggaaaaggtagagaatagagacgaatattattttcattcttttggtaaaaaacaacctgaccttaattgggaaaatccaatattaagaagtgaactttaccaaatgattaatacctggtctcaaatgggagtggcaggatttagagttgatgctattacatttatcaaaaagaatttaagttttcaaagtttagaaagtgatggtgttgatggtcttgttaaatgtacaaaaacagttagaaatcagcctggaatagaaaaaatgctttatgaattaaaagaaaatacgtttaaaaaatatgattgtatgactgttgctgaagcagcaggtattagctatgaccaactaggtgattttattggagaagatggtttcttttcaatggtctttgactttaaacatgctgacttagatgttgcttctggtagtgagtggtttaaaagaatttcatggacaattccagatttaagaaaatgcattttagatagccaaatgtatgttcaggaacatggatgggcagctaattttattgaaaatcatgaccaaccaagagctacaacaaagtatcttttgcaatacgaaaggaatgatgatgcagtaaaaatgttgggagcaatgtatttctttttaagaggaacaccatttatttatcagggacaggaattaggaatgacaaattttaaaagagataccataaatgattttaatgatttatctagcattgaccaatactatcgttcaatagatgaaggttactcagaagaagaagcgttagaatttgtgaatttaagaagccgagataatgcaagaacgccatttccatgggcagataaagaaaatgcaggtttttcagatgcaacaccatggttaaaggttattgaaaattataaagatattaatgcacagagtcagattaacaattcagaaagtattttagaattttataaaaagatgataaagttgagacaagatagtaagtattctgattgtttgatttatggttcaatagaacctattgatatagaaagtgacaatgttattgcgtatagaaggcaattagatttggtagttattgattgttattataatttttctgataaacttgtagaaataaaaacagaagaaaaatatgatattgtattccaaaatttagatgatataaatctactaaataaaacagtgagtttgaaaccatttcaagcagtattattgaaagtgaggtagaaaaatgaataaatataataaaatagcaaatgagcttattgaaattattggtgaaaataatattatttctattacacattgtgccacaagattaagggtgatggttaaagatagagaaattattaatgataagaaagtggaaaaggttaatgaggttaaaggtgttttctttacttctggacagtatcaaattattctaggaacgggaatagtcaataaagtttatgcagaagttgaaaaaatgggattgaaaactttatcaaaaaaagaacaagatgaattagttaaaaataatgaaactggatttaagaaagttatgagaactctagcagatatatttgttcctattattccagttattgcggcaacaggattattcttgggattaaagggttgtttgtttaatgataatgtacttggattatttggaatgtcttctgcaaatattccattgtatattcagacacttgtttcggttcttacagaaacagcatttgcttttttaccagcaattattgtatggtcagcatttaaggtatttggaggaacacctgttattggacttgttattggacttatgttagtttctccaatacttcctaatgcatattctgttgctgacccatcaaatgaagttgaagcaattatggcatttggatttattcctattgtaggctgtcaaggaagtgttttaacagctattgttacagcatttattggagctaatcttgaaaaatggttccgtaaacatatgcctaatgtattagaccttattttcacaccattctttgttatgctaataacaatgttagttattttgttaggtgtagggcctataatgcatacaatagaattaaaaatggttgatatcatcagtttattgattggtttacctttaggaattggaggatttattattggatttacatatccattagctgttattactggcttacatcatacttatgtaatgattgaaacatcactattagcaaatacaggatttaatgcacttattactctttgtgcaatgtatggatttgcgaatattggaacatgtctagcatttatgaaaaaatctaaaaataatcaagttaaacaaactgcagttggagcaatgctatctcaactttttggtataagtgagcctgttttatttgggattcagcttcgatataatttaaagcctttgattattatgtgtgcatcttcaggtttaggagcagcaatattatcaattttacatattcaatctaattcatatggattagcagttttaccttcttatttaatgtatatctatgatggatataatttaatcacatacttattagtatcaatatttgtggttgcattctgctttattgtaacatgtttatttggagtgcctaaagaagctataaatgaagatgaagacgaagaattagtgtttaatgaaaataatgaaaactttgtgtctccagctaaggggaaaattgttgcattagaaaatgtaccagatgaaacattttctaaaaaaatgttaggtgatggttttgctattgatattatagatggaaaaattgtttctcctatttcaggtaaattagaaacagtattttcaagtggacatgcatttgggattaaaggaactaatggagaagtattaattcatgttggaattgatacagttgcattaaatggagatggctttgatattgctgttaaacaaggagatatggttaaacagggagatgttcttgttaatgttgatttaaagagaatacatgaattaggaaagtctactttgacaatggtattgtttccagatggtaagaaggtaaatattttggatataaacaaggatgtaaaaataggtcaaagaatatgtgttgagtagtaggtgatatgtaatgactacaaaagaagattatcaagagtaattcaatctttttaaagtatgagaaataattcataaactctaaaacaattaaagaggttgtctcaaaatagagattgtactgcacccaaattgttgaaatgatgaaaatatatttaacttcatacaaaaaattaaatagtggcaacaattgaggatgtgagggagagttgccactatttgtatagggtattatattatgtttttaagctagttttactatcttctatgtttatataataagccttgtatatgaatttaatcgataattaatatgaaaattatgtgaattttttagaatgtacagtaaatatattaaggattatagatttttttgtcatttaatatggataatgttatcttagatgctgaactaccattagaataatctttgctttgaatatttgtagcaaagaaataagtattttcatttttttccacataacctataaaccaaccatttacatcttttccatttatattagcagtgcctgttttaccaaaaagtgataccccatccttttttgatattaacaatgaatcttttactgtttctatatttttatcttcaaatttaaacttatttgtataaaaactttcaagtaattctacctgttcaataggtgatatttttaatgaagattctagccaaaagtttgagataccacctgaaacatcataattgccatatccaatttgcttaagataagtttgtatgttttttagccctgtttttttgtctagagtctgaaagtaccagtttacggagttttccatagcagaaaataagtcttggtcttcattccaagaactattagaatgatgctttccatcccaagggatatgtgaattatttcttgttattatcccattttccaatcccaataaggcactataaatcttataagtagaatttggagaaattcttgttttacttttttctttattgtaaatatgatattgcttggattttaaatcatacataacaaaacttccatcaaaacctttaaaatactgacttaagtcctcgtacacagtttgttcatttgtaggtctatatttttcgttgatatctgccataatagatagtttgggaatatttccaaatacaattaaagctatcaatgtaaaaattaaaatgcttttgaattttaacgtatttgattcattatgaaaatccattatcttcaatagtcgcttttttatttgtttttttgacccaccaatatctgatgtaagtgtaagatttgatggtcttgaaatattatccacaaagtttattagagtttgtccatattctatatgactatctttatcaagcttttttaaaactgaaatatcacatgcaatttcacggtctatacgcatttctttaaatgcataccatacaagaggattaaaccaatataatatttgaaggaagcacattatataatttatcagtatatctttatttttaaagtgttgtaattcatgaagtaagatatattttatatcttttaaagataatttagatatagacttatctggtaatataatgtgtggtttaaagtatccaaatgtaataggtgtatttataataggtgatttgcatagtataaaatccttatttataccaatatcttttttacacttttcaaatataaatactatctcctcatctcttaaaatttgtattgattttttcatattttttattttaatattgcaatgaatagtaatagctatcatgattaaaattccaattatccatgatattagtaataaaatatttaaactatcaaaattaacttggtttagggatactgaaaaatcgtttaatgcatttgagttattaattatagaatttggactattttttataatagaagtcctattagtactgcttccaagttgattaaaagtatataaatagttaaatacatttccaagattaatatatttaagagggacaaatggaattattaacattataagcaatataaatccaatattgtattggtactttgcagaaatatgttttttaaatacttttttggcaagtaaaattataacaattaatattgataaggttaatgtactgagtaaaaatcgtataaagaatggggcatacatatttatttatcccccttagtcgtccttttatttaagatttctctcagttcctcaatatcatcttcagatagtttatcattttctaaaaagtttagtaccatagaattaagagtaccattataaaaacgatttaaaaaagaactactttctgtagctacgtattcttcttctttaacaagtggagtataaacgaatactctgctatttttttcatatgttaaagctccttttttaactaatctcaataacattgtttgaattgttttaggactccatgtacttgtttctaccaacttttcaattacttcagtagtgctgataggagcatatttccaaataattttcataacttgatattctgcttctgaaatatgtggtaactttttcatactatacctccttctacttacatttgtaatacataaagtatattatcattaatttagtttgtcaattattaaaaataattcatttatagttgattaaataagcacatgtagttaaataaaacttttatttaagctgtgtaagtatagctttaaataaatggtttatattgacagctaaaaatatagttgatatacttattgttgatataacaactaaaaaggagatatagaaatgataattacagttataaatggaagccctagaaaaaatggagctacatcaaaagttttaacttacttgtataaagatatagaaagattaataccagatgtaaaaattaattattttgatttaagtgaggtaaatccatcatattgtattggttgtttaaattgttataaaatgggcaagtgtatcaatcaaaatgataaagtagagtatattcatgatataattactaagagtgatggtgttatatttggtagcccaacttatggaagtagtgtaactggacttttcaaggtgtttacagatagagcacatatgatgcttgaaagattattgtatcgtaagccatgtatagcagttactacatatgaaaatgcacgtggttcaaaagcaatttcttttataaaatccatggtcttagattcgggaggttatgtttgtggtagtttatctataaaaactggatttaatcaaaatcctataactgaaaaagtagaatcaaagatacaaaaggtatctaaaaaatttatttattgcatagaggaaaagaaaaatccacctgtgctttctcaaatctataattttattgctataaatgctgttttaaagccaatggcttttaaagatattgagcaatataagggaataattgatagatgggaggagcaggggattatttaaatggaggtaaaatgaaagattttgagaaactatatgaagctacaactaagttagtaagtacttcgttaaaagtaaaagatgatttaaaaaagatgtttaaacaaaatggatatgatataacaactgaccattatgcgttattaaggtttctatgggagcaagatggaatttctcagatagatttatgtgaaaaatcatgtaaggataaatctaatacaacaagaattttagacgttatgaaaaataagggattaattgtccgtaaagtagatgttaaagatagacgtaagtttcaaatattcctaacagatttaggtagagaattagaagaaccattaaatgaaattgcaagtatatatgcaacagagacatttaaatctatctctgatgaagaattgcctttgtttactgatattttggatagaattggaaagtaaatataaatcctattttaagagactttttaactattgatgatgtagaaatatagaaagagggataagaatgaatagtaagatttattatttttctggaacaggaaattcgctagtagtttcaaagattttaaaagaaacgttaaatggaagtaaagaagttatacctttagctatacatagaaaagaaaataatatagacataaatgaagatatattggtaattgtttttcctgtttattttgctgatgttcctgatataataaagtcttttgtagagaaattaaattttaatattaatactcatatatatgccattgccacttgtaatggggtagctggacatagtttatttactatagataagttacttaaaaaaagggggaaaaaattatctgctggttttttaatcaatatgcctggaaatgctttgataacaccttcagatgttgaagaagaaagattgaaaaatcagactaatagggtagctgagattgcaaaatgtatcaataacttggagattggaaatatagaaggaaaaaacaatttaaagtcacatatagatagtgttgtacttcgtttagtaggtaagaatatgcaaattgcaactactaaattttttgcagaaaataaatgtaatggatgtgggacatgtaaaagggtttgtcctgtagagaatataagtatagttgataaaaagccaaagtggggtaatgagtgtgaaagatgcctagcttgttttcactggtgtccaaaagaggctattaatgtaaaaaaatcttttttaacgaataggaagaagtatcaccatccagatattactgtaaaagatatatttttagataaatagatatatttgacttgtattaataattgttttattaaataaaaacgttagagatataaaagaaatataaagtaatcttgtaaagagtaatgttacctagactaaatggaatagagattaaaaagaacaatataaataataaattatgttaatagtatatagttacactaatataaaataaaagtgcctcataaatagaagtttttgaggcacttattatttggctaaattagtttttattattttgtaatatcaaccgtttataatctcgaacattttttttatatcttctgatgccatttcaaattttgatttttcaatcagtatgtttccaccagtcataatatatgatggaaatactcttaaattatcataataaagttcattattacgaagtttatatgttgaaatggaagggatgacattcttttttatatgctttttagtaatcatattaaaagatttttttgcaacatctcccattaacattactacctctaggtttttaaataatttaatttcttcttctaaaataggcatatgtaatttaattgtatcacgagttattgtatattctgatttaggaagttttactgcattagttatatagatacccatatctaggatatcatttatgttagatacttctattcctgcactgtcaaataaaggaatagtagtttttaaataatcagcatctttatctacactataaaaatcgtcattggtgttagttgggacaacctcattaatcattatagtttttattttgtctgtttctattgttatattaggaaggtaggatattattctgttgtcatcaaaaagattgttctgtttaataaattcacttaactttgattttatatttattttcatataacgagtctccttagttttaagctttaaattactataaaaagctagttttaaagcacacaattttgaaaatatagtagcatatttgaaagtataataacatataaaacatgacaacagaatgtcatgttttataaataatctatcgcaacttagaatttattagagactctgcctgttcataatcgtctttatgaacataaattaagtactcataagagaaatcttccttttgacctaaattgccaagtgttatttcattagaaaaaggttttttagagtaagcattatttttcactttatacttatatttaattttatttactgataatatattgcatatctcgttaaatctatttaaagaatatcctcggaaaagctcagttctatttaaaatcataaggaaaacctccttttaaaagtaatatattgaaaagcataggagaaatgtactataagttgttataaataaaaggtagcaaatttaaattgatttgtaaagtttttaagagtattatattagtgataaaataaataatttttataatctaactaataacaatttaaaataggtaacttatgtaagaatcgtagggactacggagatatcctgtagagaattaataagacatatttaagtatgcaaaattctattaagtaggaaccttgtaactttagtcatgtgagatttataaggatatttaagtattgaaaggagagtttaattgaaaaaaatatctcaagaaaaaataagtacacatatccaagaagtaccacaggaaaaaattgaacagtggaaatctttatatgaaaaatataaaagtattttaaaagtaaattctaagtctgttttagaaataatagagtttttaaagcgaaaatatgtaatagtagaagaaacttcagaggaatttaaacatgtagttatcaataatattaagttaaacaagcctttttcacaaaagatttccagtgataaagaattaaaacctattgtatttacaattccaaatgaaggaaatgcaaaaaaattgtacgatactcaagaggaaacttatagtggctgtaagattattgtaggtatggaatttgaaacaggttgtgtttttgtagaaggtagtgatgagcttaatgatgaaataacttcttttaaaggattagataaatatgatataagtaattattatttagtagcaaactatattagatgtctaaagaaatataaattaatagattagtgtttgattaataaattagtgcttgatttaaggattatagagtaaatttgaagttagtgtgataatgaaactaagcttaaatctaatataactgtaaaacataaacttaaatagagttgccaaaataaaattggtaactctattttttattttaatttttattaaaattagtaggtgttatagaattgttattttttcatgttagtattctcttagtaatagatttaaggtattacaagaagggagaaattaatatgaaagatttaattcttgaaacaaaaaacttatcaaaaagatatggagaacaaatggcagttaacaatgtttctctacaaattgaacgaaatagtatatatggacttttaggaccaaatggagcaggaaagtccacaacacttaaaatgcttgttggtcttcttcgcccaacagatggtcgtattatttttgatagaaagccttggaaacgagaatctcttgcaaaaataggttctttaatagaatcccctgcattgtatggaaaccttacagcagaggaaaatttgttagtacatacaaaaatattgggaatacctaaagataaaatttatgaagtgttggaaatagtaaatttgaaaaatacaggtaaaaagagagcttcacaattttctatgggtatgaaacaaaggttaggaatagctattgcacttttgagtgacccagagttgttaatactagatgaaccaaccaatggtcttgacccctttggcattcaagaattgcgtgaattgattgcttcttttccaaaaaaaggtataactgtaattctttctagccatattctatcagaggttgctcaagttgtagataatataggaattataaatggaggacgactactatttcaaggaatgcctgaccctaatgaaaatctagaagaattttttacagatgttattcttaaaggaggacaaaacagatgaatgctttacaatcagaacttttaaagtataaaagaacatttatgggtaaacttattgtttttttcccagtgtcttttgcagcatatgcatttataatgcaatcaacactcatgcaaaatccattatctcaaacaacttcttgggcgtggcaaagtcttttagcattaatttttaactggtggtcatttttatttctgcctattggatttgcattgtttgctactttggtagctttccaggaaaaaaaagctggaaattatcgtgctttacgtacacacaatgtgtctcctatgacactttggattaataaagttatagctatggcagtctacagttttatttcaacgttagttttaatagtcgtaacaattataactggtttaatattgaaagctggtccagttccttttggacagattataggggcaagtattgtatgctgggttgtttctcttgctatacttccacttcagctatggctagctacatggaaaggtatgttcctaagtatgggagttggagctttaggtatgatatttggtgtccttgctgcgacaaaaccattttggattgcagtaccttggagttgggcagttagaatggtatgcccaatcatcaacatacatcctaacggtactatattagaagctggagacccacttttgaatacttcagtgattcctattgggattgttgtttctttggttgtgtttatagtattaacagcgcttactgcagcttggttcaataggagggatgacaaatgataaagctattatcatcagaatggcttcgagcaaagaggacagctgtccagtggcttactctttgtatgcctattattttttcattatgtgtggttttttatctcacaactaaatctggaagtacacaagaatttgcttttgaaggattttttacagtatggactgtattcatcattcctattggagtaggtattttagcaggatttatagtgcaggaggaagagcttgctggaaattttaatggttttttatgtgtaggtatttctcgtgttagattatatctgggaaaatttctttttcttctgttttgcctaactatatgcacatttattgctacgttgatactttgcataggaatgagtattgcagtgccatctggagcaacaatatggttattcctgtcagcagcaggacttgtggtgattgggacacttccactattagctattcatctttgggtgagttttgcatggggtatgggtgcatctattggtattagtatcggtggaattttgatggcagcaatacttggattaactagcgttggtgaaaaagtatgggcatttgttccatggacatggccagtaaaactaggtatgcttccaggaatttattttattaaagaagctggaactatttcaactgaggcattttactctaaagtgatgcaaacagctagtatagagcttatagtagtagcaataggtttgattatattcttgataggaggcgttatttggtttaaaatgtgggagggaaggaaaagttattagtagacgaatattgttttaatactgaccttcccataagagaaaggtggtgttatattgagtaaaatattgattattgatgatgaaatggacctagtaatgctacttgaggatgaattgaaggcaaaaggacatgaagtgttgatagcttatgatggtcaggcaggtatagagttatcaaaacaggagcctgaccttattatactggatattatgatgcctaaaatgaatggatttgaggtatgtcaggcaattagagatgatgttttatgcccaattatatttttaagtgcaaagcaatcagaaaccgacaaaatcaaagggttgacctttggaggggatgattatgtaacaaagccatttggactgcgtgaacttatggcaaggattgaagctaatctgcgtagggaaaagcgttcacagtatatcaatgaagagaacaagagatctactttgtattttgggaagttatgcttatatatgaaggaacgtgcaattaaaattgatggtaagaatattgatttaacaaaaatagagtatgatattgttgaattactagcactccatgcaggacaagttttctcaagagaacaaatctatgaaaaagtatgggggtgtgattctgaaggtgattcctcaactgttgttgaacgagtaaaaaaaatacgagctaagttttctgctgtgacaccagaaaaagaatatatttccacagtttggggtattgggtataagtggaataaaatgtaaagagagagaggttattaaatgaaaaatcaatcccttattacccaatttagacatacttttatttttattataatagccagtatagttgccacagtgattacttatgtatttgctctctatttgtatattcattccttaaataaggatatctatccaccaaactattatgagcgacaagttcctagaattgaaaaatacatcaatgaaaaaaacataactttgttatcacaatcgaatgaagaaggtttaaaaagaacgattcgtggggatgatatgccatatcaagttgtggataataatggcaatattctatatggtactaaccccaaaaaactatttaaaacaaaagaagaattatttaataattttatcaataaaactgttcgtaaaggtggttatatccatactgttccaatcaaaggggataatggaaagattgagggagctgttattctattctatcaagtcaaaataacctttgcaaatagtagagggagatttgtatttgcagttattataatggctctgttttctccatttatatatatcgtgggttttactagatggctttctaagcgctttgtaaagaatatcaatcaaccattacatctattgattgatgcgtccaagaagataaaagaaaaggaccttgattttgaaatcgactattattcagataatgaactcggtaaactttgtagtgccttttctgaaatgaaagacgaattaaaaggttctttatctgcgcagtggaagatggagcaggaacgtgttgaaatggtggaagctctagcacatgatttaaaatctcctctttctattattttgggatatacagatgcacttattggtaataatacagatgacaatgaaaaacttcataggtatcttacagtgataagagaaaatacagaaaaaagtgctgctcttgtccaaaagatgcaatatacgtctgacttagaaaagtcaaatatacaattaaatcttgttcctataaatttacctgaatttttgaggcaaaaggtgcaagactatgaattacaggctcatcaaaaggaagttgaacttatattgaaaatgaaggggaatatacaatccccaattcaaatcgacgtggataggttgacacgaatttttgataatatcatatccaacagtctgcaatacactccatcaggtggtaatattagtattactgtaaaggatgaaaaaaattgtatttcttatgagatttgtgattctggtagagggtttagctctaaagatttaaaaaaggctcttgataagttttatcgaggagatgaagctaggcagacaaaaggtggacattctggtcttgggctttacattgtcaaacaattagtggaacagcttggaggttctgttaaaatagaaaattcaaaatcaggtggagcatgtgtgaaattttggcatagcatttaactatatattttaaattaaaggggagtgtctcaaagcgaaatttttaattcgtgaggcactctttttttgtgaagttaaatatattttcattattccgacaatgaaaaaaggcttatctctattttgagacaggccttttttaaagcttatattatagttaaaaagatttattagttagatttgaaagaaaatagagacagtcattgataatttaatttatattattatctgtaaaatagttataaattgatatctatacagtcaattatattcatctttttaacttttcttaacggaataagagtagctataatacatgcaagtacagaaataatagtagcttgtaaaattgaagtaattggtatattagtgaaatcaagcttttctatagttgccatgtttataataatagcactggcatacccagcaattgaaccaaatatagcagcaaaaattccataataaacaccttcccataaaaacattttatataagctaatattactcataccaatagctcttttaactccaatctcattagtcctagtatttatatttgtatgagttgtgttaatgatgtttaaagtaccaatcaatcccacaaataatataactgcccatgctagaaattctatttgtttaaaactctctttaagttgcttatctgattcaatatatgatatccaatgagagccaggattattttcacaaatctgttcaatagacaatcttatttgttctaattttgatttatctttagcataaatatttatctggttgaacttgtttttatttgtcaaggtgttataaacagaattatatacaataacatcaacaccatttatccagccattaccttgtaaaaagaacattttatctactgtactatatatatctagttgttttttgttgattgtgatactatctttaggttttaaatttgtatgtctagtttttacacctggtgtagaaatagcaatcggattttttataaaacagatagaaccatttttaaagtcttctagtatagaatctgtaatagaaggcattaagtcttttaaagtctgctcgtcaattccaatgatttttaacatctcaccactattttcaaaatttatatctgtatctatttcaccctgtttgtattcagagtactttataaaggaagtgcgattgacgtttttcattttatctattttatctagtgttgatttatcaaaaccagatatttcatttgttaaggaaaaatctccttcttttaaattgcttactgacctagatacatctaatacattagagaactcactcaatgcaacgaatactgttatactcataaataatgatagtatagttattatagttcttcctttatttctttttaagtttagccatgctagatgtctttcaaagttttttattgctttttctcttttaatttttcttttgattttggtagtactaccagccatagcaattttgggagagacacgtgaagcatatattgctgatggtaatgctgaaataaatgaaaaaatcaaagatacattagtgcttaatactaatgggaacatatatgctgttgtatttttatgtataagctcagtaatttctttattatcatttgctagaagtatatctggatttaagatattagtgaccattccagttatgcctttagaagagataattccaattacagctccaataggtatggcaacagtacataaaattaagatttgtaaaataactatcttatatatctggtttggttcagctcctattgctcttaaacatccatactctttaattttctttgtaacagagatttttaaaatattatagattacaagtccagaagccagtaaaaccaataaggcaacaaataaagataccaatataatcatagatataccatcactattagaactattttcatctttttcaaactgtatcttaagagcatttaagtaaatccaattatattgaattgaattgtgagaaagatttatttttttagctaattgatttactatttcttgaaacttttcttgctgttttattttaaaatccaaagaggataaaatatatctcttaggtaatagattttctgatgtacctttacctacaataccatttactataccacttacatatcctgtataatcatcctctaaaatgccactcaatttaaagttagctgtgtaattatatggtggtatggtatcatttaaaagtgaaatatctaaattcataggtatagtcactcctagtcttggttttatacccataagctttagagtgttttcatctaaggctatttcgtttttatctttaggcaaatgtccagattttaatttcattaattttgggtagttagaaagtcctgttttatcatactcttttacaagtacagagataccagaatcctttattttactactgccaatagttattgaagtaccagcttgataaactctatcatctttctttatgtcatcaacttgatttttagtaagttggtgaaaggatacatgtctatcaccattaaaagaacgggcttgttcaattcttaaattttgtaggataccaattgactgtccaaccacagttgtcataatagttgatagtactattgctataatgatgaatgtagtcataagtttctggctttttaattcttttattgaaagtgaaaggtaattcttcatttctatttcacctccataagaacaccatcaataattgaaatttttctatcagcaagttttgcaattctatcatcatgagtaattaccactaaagtctttccaaactgttttgaagtttttataagaagattcataacttcactgccacttttactgtccaagtttcctgtaggctcatcagcaaatattatatctggttttgcaataagtgctctagcgattgcaactctttgttgctgaccgcctgaaagttcatggggaagatgattgagtctatctgcaattccaagtaatgatgaaatttcatttaaatagtctttatcaggttgttttttatctagaagtacaggcattgaaatattttcagatgctgtaagaacaggtaaaagattaaattgttgaaagacgaatccaaaggattttcttctaagtgcagatagttctttttcagtgtgtttatatatatctttatcatcaagtaacacttgtccagaggtaggattatctaatccacttaaaatatgtaaaagtgtgctttttccacttccagaaggtccaattacagaaacaaattcacctgagtttatttttaaatttacattattaagtgctataactttattgttattagaaccatatatttttgataattgttttgcttttataatcataaaaaacactctccttttctatataagaagagtgtaagttttaaaactcaattttttcccaacttttagcttaaatctaaaaagtcttcactatttacggataattcgcagtgctgataagcagtttcagtatcatttttaatttaaaatgtaatttatgcactaaaggctttacaatacaactctattgctttaaaactattttacacataaacttgtggataattttttatgttttacttcctcattattatataaattatttttgtcacaaattctaagttgtcacataaatatactttttatatcacgatttaattcttttgattttatcataattgctatttcttcaaaagaagaaagaaaagccacgatacatatcataattcctgcaacatcaagaccaaagcaaatatagagtaatggaaaagcaaagatagaaattccagtgattttattcatcaaagtatgaagcgatgaaaatgtgcgatacttaaaaaaaccaatactgtaactaatcaaccgtaataatgctattgcaacaatacaccaccatagatacatgggaagagcaatattttttccgacagtaaccaaaattgtaaccgcaaaaatgaaatcagcaatactatctaactttgcacctattccactttgttgtctcaactttcgggcaataagaccatcaagtatatcactaattccacaccaaaaataacatatccagaaaggcagtgaacagaatgtagaactaagcattagcaatgcaaacacaatacgagagaatgtaatattattagcaaaacttttaatataatcacctccaaaattctagtttcatactattctacatatttaaatatatatttctattattgtttcaaatgccttttgccaaaatattataattgaagcaactcttacaacttctacaaaatagtatatatattggttgtaaattgaaatacattttataaattctaaactaacaaagcttatataagaacaatgaaagcttacaaaatcattttaatttcttgttgagaatttagcagtaattttagcactgttagtagaattattttcaatagaaatagagccaccatgtttttcacataatatttttgagatatgaagacccataccaaagtgtggattgctgtcatttaaagtcttatctctatagaaaggtcttaaagctaattttagagattccttactaaatcctataccatcatcttcaattacaaaggtaaggagttcttgttcaagatatataagtatggatacattatttctagcatatctaaaagcattcgatattatattttcgacgactctaagaatgatattttcatcaaaaaatagatttatattatttatttgacttttaagtgtaaaagattttccttcttgtttagcaatgatagatatattttcatctaagttttctataaacttgtttatattcgacatagattttgaaacaactaaatcttctaatcgttgagcattactcatattttctacatagtattcaattctgttaatatgctcagacataagttgtgtggttgataaaatcttctcatcactaagtttgcctgttggtatgtattttgttaaatagtttgagtaaccttttagaactgttaggggatttcttaaatcatgagaaaaagcagcattaagttgttttctatcattaatcatagtccacatatttatgttgtttttatttagttcagacctcattttttcaaaagcattacatagattacctaattcatcattattattatattctaagcaaaaatctaaattgttgttggatatttccattgcacctttattgaggatttctatgggtgtttttaattttaccttgtaaaaaattatatcagctaataataaaagtcctataaaaaatataagtggaagtacaagctgaagtatgttgattatattaagtaatgttttatcataatcactaaattggttcacattgttttgaactatggttataatacctgtatttataggtgtttttaaatacttatcttgtatagaattatatagattattaagtaaaatgtatgcgaaagtagtaagtactgatgctataattagtgaagataaagtaagaacaaagaaagctttttttaatgacatattacttattttatccatttataaccaactccccagactgtttctatataattttcaagagtatgttttgatagtttgattcgtatttttctaatgtgttccattataacatcactatttccattgctattgtatccccagactctatcatatattttttctttatcaaatacctgtccaggattcatagagagaagctctactatatcaaattccttttttgaaagtgaaatctgattattatatatacaaattaaccttttttcgtaatctattgttaaatcattataaaatttaattttagtttgatttgacttcctttgttcacgtcttaaatgtgcagatactctagctccaagttcgtctaaatcaaaaggttttacaatataatcatcagcaccagcacgaaaaccatttatcttgtcagtattttcaattctggctgtaagaaatagaatagggcatgatacataatctctaattctattacaaacttcaattccatctatttcaggcatgtttatatcaagtagaatgatatctggatttttggatattttttttaatgagtcttttccactttgagcagtgtaaacctcataaccattcatttcaaagtaatcttttaagagtgttattataccttcctcatcatctacgacgagtattttattgttcataagaatgctcccttctaaattaagtttgtatagtatttatattttagtataaaaatctcaataaattctcaaattcttagttatatttcaaaacttaatcattaaagttagtatatttttatatattaaataaatcaaggatgaaattattagaaattttaatagaatatatatttgatatttaatatttattggaatgcaaaaacacagctgatgaaatcttataatttaagttgaaaatggataaatagaaaggaaggattttaattaaaaaggtagattaattaaaaagtatataaattataaaaatgaattaatctacattaattagttgatatatcaattattattattttttcagttgcttaaaatatacttgatatatcaactaatgttgttttttaattaaaagaaattttaggaaagataatattaactaggagagataatatcaacattgaagaaggtagagcaatatttttacataattgtgaacattatctggcatgtgtgcattggtgttttaagcaagcaattcaatagaaagatgtgactaaaaatagaaagaaataccataatccacatgtaaagctagaagacataataagtaaaaaaagtaaagatatttaataaaagaaataactaatagtgattaaattagtaaatgctgacaattagcataatcattagtaattattagtattatttaattaaattaattttagcattatttttattaaattaattttaaatcaaattaatgagaaccccataaatttttttaacacttaatttatgatttatggggttatgttctgttttatttcaaagtattaagttcatataaatcagttcttctgtgcttaagaagtggtaactgttgtcttatgtcaggaattaaatctctatcaatgtcagcataaataatacattctttttcatcagcttgagcaattattcttccccaagggtctgaaattcttgaatttccaaaagctatataagaagcattcatatttctagcaggtgcagcaccaacatagaatatctgattatctaaagcacgcattcttatagataactcccaatgggcgggaccagtagtcatattaaatgcagcaggtaagataacgatttcaacacctttaagagccattaaacgtgataactcagggaaacgaatatcatagcaaatagctataccaacttttccatattcggtatctattacagtgacatcatttccagctgtaagagtatctgattctttaaaactaacttttcctgtaacttcaatgtcaaataagtgcattttacgatgttttccaattagagctccatttttatcaaatacatagcaagtattatagatttttccatattctaactcaggaatactaccagaaactagataaattccatgtttctcagctaatttactcaatatcgttgttgtttcacctggatattcttcagcaaatttaggaaaatatttattttcatatgggcagttaaacatttctggcaaaactataattttagctccattgatggcagcttctgttaccatatctacagcatgattgatattttcaattttattttctgtggtcatcatctgacatactgcaattttatagaaattcatagaaattactcctttcaatatttttatgttattataacatattaaataaaaattagatattcttagattgacctaaatgggtatggagagaagtgaataagaatattaaaaggtatataaaagttatttttattatagatggaacccatatattgactttttttatatatgttgatagtattattatagataaaatagaataattaatagagttttatagggttttgcaattattaatgattggcctggtccgagataaaacccacaacatagtttttgttgtgaacacggaaggacaaaaacctgggagatattttataatatttctcaggttattttattggaaaaataagagatacatttgaaaagagggatgagtttatgaaatggttatttttgtttgttgcaggtttgtttgaagtgttttgggcttttcaactaaaaaattcacatggattttctaaattaactccaagtatacttactgttgttggaatgattgtaagtttttattttttgtcattagcactaaaacatcttccacttggaacttcatatgcaatatggactggaattggtaccgtcggtacagctattgtaggcatggctatcttaaatgagcctattagtatatcaagaattgcatgtataggctttattgtggtgggaattgtagggttaaagctattatctactaattagagtatattaatttaaataagctatgaaattaaaggcgagaaaatgtttaaaaataatcaacatttaaaaagtctttacttcatagcttatcttatttataagtttattatatttgaaaattatatgtatatactatttatctaataaaagagcagttaaatccatagggtcaactattacaccatctttataaacacgcatatttccagatgctatttcatctattaagattacttcatcattgtagaatccaaattcaaatttgatatcataaagttcaagacctttttcagctatagtatcacgaactatattagaaattttttgagtcatgcttttcattgaatcaaattgagcttgagtcataatgtttaaagcttctaaaccttcagatgttataagagggtcacaacggtcatcatcttttaaagttgcttctacatagcaatctagtttagcaccttcttcaacacatgaaccataacgacgtaagaaactaccaacagctctataacgacaaataacttctaatccattaccaaaaacttttgctggtagaacttccatagttgcttcttctaaattagcacttacataatgagttttaattccagcattgtttagaatttcaaagaacttaacagatgtctctaaattagctctaccaattccatctatacttagacctacactattttcgcctgggtcaaatactccatctttaccagttacatcgtctttaaatttaagtaagtaatttccattatctaattcaaaaacatctttagtctttccttgatacacttttttcataaacaacctccaaaaagttaaattattatattgaataaggcattagtgtcaaaaaagttctgatattcgcatgaaaatttatattgataccttatatttaatattatatcacaaatagaagggaaatttccgaacaattttataaaaataacaaaaaaagtacattttataaaacttataataagagaactaatataaaatgttagtgtcgtttatattgacacacataagttttaatataagaaacttttgacacactttgacacacatttaatgataattttataaaatgcatgaatgcaatgcttacatatattggcatgaaagttgctttagatatttaacatataaacaatagggatatattctcaaataaaaagtaggggtggttaatagtgaagtcagttagattctatggtataagagacacaagagtggaggatgtggatgtaccaaaaatattagaaaaagatgatgtaataattaaagtaaaagtagctggaatatgtggttctgatatatcaaaatattcaaagacaggtccacatatggttggagaaattttagggcatgaattttctggagaagtggcacaggttggtaaagaagtaaggagttttaaaataggagatagagttgctgtttgtccagctatgccatgttttgaatgtgatgaatgtaaaaaaggattgtattcaagatgtaataatgtagcaataataggaaataaagaacttggaggttgttttgcagagtatacaaaggtgaaagagaggaatttaataaaaataccagatgagataagttatgagactgccgctgcgctagaaccagtatgtatagcagggcatggtctttttagatcagaagctaaagttggagatactgttgtagtacttggtacaggtacaataggattattttcaatacaatgggcaaagatatttggctctacaaaaataatagctgtagatgtatttgatgagaagttagacttggcgaaagagttaggggcagatatttgtataaatgcaaaagaaaagaatattgtagaagaaataaaaaggttaactgatggagatggtgcagatattgttattgaatcggctgggactccaatgacatgtgggcaagtattgttgttagctaaaaagggagggacagtattgtatgcaggtgtaccatatggggatgtagctttgactagagaacaatttgaaaagatagtaagaagtgaattaactgtcaagggaacttggtttggaaactcttttccattcccaggaaaagaatggagtgctggattgtatcatatgcaaaagggtgatatgaatgttgaaaaattagtaacacatagaataaatttagaagaagtaccagcttattttgaaaaagtatacaaaagggatattttctttggtaagataatgattaatatagataattagattagagtactaaataataatccatataaacaaggttaagaaaggtatgattcatatgacagggataattatagccacacatggaaatatggctaaagcaatgttagaaagtgctgaattaatagtaggcaaacaggaaaatgtagaaactttaggattaaaccatggtgacagcatagatgagtttagtagaaggttagaagatagaattgagaaatataaggatgaaggggttttagtattgcttgatttttatggcgggactccatttaatacatctgctattataataaataaatttgctaaggtatgtgagttagaatgtttgacaggtgtaaatttacctatgcttttagagctatttttaaacagagatactatgaagttaaaagacttgaagaatttatgtgaggaagttgggatatcaggaatcaaagatgttaaaactgttttaaagttgtaaaataaattaaaaatctggaggaataattatgagtaatatagcattaacaagaattgatgatagattaatacatgggcaagttattactgcttggtgtaagattacatcggcaaaaaggatagtaatcgtggatgatttagtagtaaaggacccatttatagttcaagttttacaaatggcagctccatcaactgttaaggttgaagtacatgatgtagaatcaggtgctgaagttttaaaatcacataatggagatgaacatttaatagtattggtcaaataccctaaaactgtcttaggtttagtaaatagtggggtagatttaaaggaattgaatgttggaggtatgggagcagggcttggtagaaaaagtttttataaaaatatatctgtgtcagatgaagaaaaagaaatatttagagaactaatatcaaaagatgttaaatgctttatacaaatagtaccagatgcaaagaaaattgatgtaggaacattattataaaaaagactatcttgtaaatctttaaaagaaaatagggaggaagaatatgcacatttcactaattcaagcagtattaatagcaattttttattatctttcttggagtccgtggttgacctatgttggattttttacatggaatagacctctattggctggatttgtaacgggaattatattaggagaccctgttcaaggagcaattataggagcaggtataaatatgatatatctaggttttatatcagcagggggagctcagatgggggacccagcttttgcaggatatgtaggtactgctttagctatagcatctaagctagatgtaagtactgcaatggcaatagctgtaccattgggaactgttgcaactgtactttggattggaaaaatgacagtaaattctttttttgcacattgggctgatagagaggttcaaaaagggaatgttgatagagtagcatttataaatatagtaccaccacagatactgttatttgcaatgagttttataccagcattattagttgtttattttggtccaaatgcgatagatggtatgttggaagtaatgaatgagaatgtgttacatgtatttaatgtaattggggctatgttgccagcacttgggattgctatgaatttaaaattgattggaaacaagtttactatgccctttttcatattaggaatactaatggctgtttattttaaagtagatataatagtaatatctgttattggagtaatacttgctcttacaattacttcaattaagtacggaaaagatagtgctacatcttaaatacatgtgagggggaaaatattatgtcagatataaaaaatgaagtatctaagaaaacgttaagcaaaaaagatgtaataaaatcatggttaagatggtttttctttgcgcaatctaattacaattatgaaagattgcaatcaacagctttctcacattcaatgttgccagtacttaaaaaattatatccagataaggaagagttaaaacaagaagtggagactcatttagcattttttaacacagaacctatatgtggatgtgttatacatggaataacaatagctatggaagaagaaaaagctaatggagcagatgaaataagtggagatggtatgaatgctatcaaaacaggcttgatgggtccactagcaggaattggtgatactttaactcaaggagttataactcctatagtgttagctgtttgtattggtttaactgagggaggagcatcaattgcaggtcctatattatttgtaatagctcaatatataataatgacttcaatttcttttggaatgtggacaaatggatataagtatgggaaaaaagctgttgaaagtatacttcaaggtggaatagtaaataaggttatagaaggggcttctatattaggtactttagtcatggggggacttgtaggtaggtttattaatttatctacaccaataagttatactagtggtgattttaaatttagtcttcaaacggatttacttgataagatatttccaggattaattcctttggtacttactttattagtactctttgctttaaaaaaaggcctttctccaataaaaataatgtttatactgatagtagtgggagctattacaggtattttgggactattttaaataaatatatatgttggtgtgtaaattaggattctatatctattgattatatttgtaagatgttggaaaatttatattaaaaagtttagcaattagggtaattttataatagattaaattttaaacttatataagctatatatagtatttaatattttaaaaagtatctcagaaagatttttaatcagaatgaggtgctttttcatttgcatataaaatattaagtaatttcaaaaaaatataaatttatttaatttaattaaaatattataatatattagttacatattaaaatatataatcgagatattgttaagacattgtcgagatattataatatataactaatgtattataaatagttgtaaacttcctgtaacatatattttatataattaaagtaatggatataatatgaaatataataatgaattttagggatgtgaataaatgaacatattaattgctgatgatgaaattagtatgcttaagatactttgtgcatattttaaaaaagaaaacttcaatgtgtttactgcaaaaaatggggaagaggctttagatattttttatgaaaataagatagacttagctatattagactggatgatgccaataattgatggaatagaggtttgtaaagagataaaggaaaatagtaatacaagggtacttatgttgactgccaaaagtcaaagtgaagatgaaatagaagcactcaacattggagcagatgaatatataaaaaaaccatttgatcctagagttttaataataagagctaagaaactaataaattataaaaatacaattaatattaaagatttaaaaatagattttgggtcaagtaaagtttttaaaggtgataaggaattattattgactaagaaagaattagaattaattcgttgtttaatcaataataaaggaatggttttatctagggaaaaacttttagatttagtatggggattggattatgagggagattttagaacagtagatactcatataagaagattaagggtaaaaataggagaagatataataaaaacttatagaggattagggtatagtctggaggattttaatgactaaactaaacaaaaaattgtccataagtatatctatagtagttgtagttgtttatataatatctataattataaatagtatgtttattcatagatattatttacatgaaaaaagaaatatattggataatgttgaaaatgaaattaaagataaagacatagataaattaaaatcagacattactttaattgaagaaaaaaataatatagatatcgtatatatagaattagataaaaatcataaagataaaggtaatatagataaaataaatcaagatttattaaatgcattttggaaaaaaggtttaagtttaaataagttttggattgaagaaaatagtttaaataatattgataagaaaagtataaataagatatacaatcaaggtaaaacaaaatatagtttgcttgtaaaatttatcaagaaggataattatttgtttgctatatctatacctatagaacattctgaagaaactattggcattgtaaatagatttaatataataatgggaattttttcagtagttataataactatacttacatttatattatcaaacagagttataaaacctatggaaaggttaaagtttttatctaaagatatatctgaattaaattttaggactgaagatataaaaacgaacgatgaaatagaagagctagcttacagcataaacataatgagcgaaaaacttgaaaaagcacataatgaattgaataaaagaaatgagaatctaaaaacttttatatcagatgcatctcatgaaatgaaaactccaatagcacttataaaagcatatgcaataggtatgaaagatggtttggatgatgggacttatacagatacaataattgaacaagcagaaaatatgaccaatacaataaattctcttttatattgggcaaaatatgagaagaaggagagaagtctgtgtctggtagatttaaaggaaaggttatataaaagtttaaaaaactatgagctgttgatagaaagaggtagtataagtgttaaatgcagtgtagatgataaagaacttataataagttcggatgaagatagtatagatatggtatttaataatttgattagtaatgctataaagtatactaataataatgaaatagagattaatctttttgaagagaatgagagaattatattatccataaaaaatggtatagattacaatatgggagatgatatagaaaatatgtggaagcctttttatgttttagagaagtcgagaagtaaggagctttctggtactggtcttggtcttaccatagttagaactatacttgaagaaaataattttagatacagggttgaaatttgcgatggaattatagaattttatattatctttataaaagtaatttgaattaaaatgtaaatataaagaataattaaaaaaatatcgcaattatttgtttttcatatggataaaattggttatttaatatataattacaagtataaataataaaatttatttgtaaaaagagtagcacttttaattctaaaggctactttttttatacaaaaccatgttttttataacaattcattaacataaaaatcaaacttaccttaaaatataaatttacaaatttttcaatcaataagaaaatttctctattccttacataatgactgtaatgtaacaaaataattacaaattaattatgaaatcattatagttagaaacctctttaaaattagatattaagtatcctttagaattagaacgggaacaaagttaaaaaattaagtaatatcaaatggacaagggggaagaaaataaaatgaaaataccaaagaagattgctgcaatgcttacagttacaatgatagctggaagttcaacagcaggcatagctagtgcacaaactgtggcaacaaatttaacagggcaagaaagatatgaaactgctgttaaaataagtcaagatggatggaaaaatgctgatgaggtagtaatcgtaaacgactcatctatagcagatgctctatctgcaacaccatttgcaaaagcaaaaaatgctccaatacttttaacaagtaaagataaattaaatgataagacgaaagcagaaatacaaagattaaaagctaaaaaagtatacttaataggtggaacttctgtattaagtacaaatatagaaaaagaaataaaagatttaaaaatatcttttgagagaatctctggagctgagagatatcaaacatccttagaattagcaaagaaattagatgctataagtgatgttaagaaaatagctgtagttaatggtgaaaaaggacttgcagatgctgtaagtgtaggagcaccagctgcacaaaacaatatgccagtaatacttgctgattctaaaaatggaacagcagttgcagacaaatttataaaagatgctggaataactcaatcttatgtagtaggtggagagagttcaatttctgaagctgttaaaaataaactaccaaatagtacaagactaggtggaacagatagaaatgatacaaatgcaaaagtaataaaagaattttataaaaagacagatttaaaaaatgcttatgtaactaaagatggtatgaataaacaagaccaacttatagatgcactagcagtaggtgtattaggtgctaaaaatcaatcaccagtagttttagttggaaagaacttatcagcttcacaaaaatctctagttaactctaagagttttgataagataactaaagttggtgggaatggtaatgagacagcatttaatgaaatgaagtcattacaagaagtaaaaacagttgaagctaaaacaatttctgaattaaaatcagctatagataaagctactgctaatgatgttataaactttaagccaactagtgaggttaaagaagcatttacaatacaaactgataaggcgataacagtaaacttaaatggtacatatacaaagactgtgactatcaacatgcctaatggtgatgtaaataactatgcaaaagtggatgatgtagttatagatgatgtaaaagatggaacttttgttaactacggaaaaataactaacttaaaggttaatgataaaaatggagccaagatagaaaataattctaaaggtgagattggtagtttaacagtagcatctggagcaagtcaagtaaaagtgactaatggtggtaagataactacagttacaaataattctaaaggaactactatagataataaaggtacaataagtagtgttaagggagataattctccaacaataagtggaaatagtccaagttctaactcttcaggaggaagttcatcaagtggaggttcttcacatggaggaggaagttcttcatcaaaagtagataaagtagttttgaaaaatacaataacagcagcaaataaattgtataatgaagcaatagagggaacaaatgtaggtgaatataaagtagggtcaaaagcaatatataaaacagcaatagacaaagcacaggcaatattagacaaatctggtgtaacacaaaaagaagtaaatgatgcagtaacagcattaaacacagcaacagacacatttaaagcaggaaaagtagtagcagtagataaaacagcattacaagatgcagtaacagcagcaacagcattacatgctaaagcaacagaaggaacagcagaaggaaactatgctgtaggatcaaaagcaacgtataaaacagcaatagatgaagcacaggcaatattagacaaatctgatgcaacacagaaagaagtaaatgatgcattatcagcattaaacacagcaacagagacatttgaagcaggaaaagtagtagcagtagataaaacagcattacaagatgcagtaacagcagcaacagcattacataatggagcaacagaaggaacagcagaaggaaactatgctgtaggatcaaaagcaacgtataaaacagcaatagatgaagcacaggcaatattagacaaatctgatgcaacacagaaagaagtaaatgatgcattatcagcattaaacacagcaacagagacatttgaagcaggaaaagtagtagcagtagataaaacagcattacaagatgcagtaacagcagcaacagcattacataatggagcaacagaaggaacagcagaaggaaactatgctgtaggatcaaaagcaacgtataaaacagcaatagatgaagcacaggcaatattagacaaatctgatgcaacacagaaagaagtaaatgatgcattatcagcattaaacacagcaacagagacatttgaagcaggaaaagtagtagcagtagataaaacagcattacaagatgcagtaacagcagcaacagcattacataatggagcaacagaaggaacagcagaaggaaactatgctgtaggatcaaaagcaacatataaaacagcaatagatgaagcacaggcaatattagacaaaacaggtgcaacacaaaaagaaatagatgatgcattatcagcattaaacacagcaacagacacatttaaagcaggaaaagtagtattaaataaaacagcattacaagatgcagtaacagcagcaacatcattacatgctggagcaacagaaggaacagcagaaggaaactatgctgtaggatcaaaagcaacatataaaacagcaatagatgaagcacaggcaatattagacaaaacaggtgcaacacaaaaagaaatagatgatgcattatcagcattaaacacagcaacagacacatttaaagcaggaaaagtagtattaaataaaacagcattacaagatgcagtaacagcagcaacatcattacatgctggagcaacagaaggaacagcagaaggaaactatgctgtaggatcaaaagcaacatataaaacagcaatagatgaagcacaggcaatattagacaaaacaggtgcaacacaaaaagaaatagatgatgcattatcagcattaaacacagcaacagacacatttaaagcaggaaaagtagtattaaataaaacagcattacaagatgcagtaacagcagcaacatcattacatgctggagcaacagaaggaacagcagaaggaaactatgctgtaggatcaaaagcgacatataaaacagcaatagatgaagcacaagcaatattagataaagcagatgcaacacaaaaagaaatagatgatgcagtaacagcattaaacacagcaacagctacatttgaagcagggaaagtacctactacaattgcattaatgttatcaagaatactaggatttatgaaataagaaataaaaagcaaattatttaataaaatttatatatactttaaatagaaaatttaatttaaggctgtgagtaaaatttttaaaaataaatttatacacagcctttttatcatgtaaagttaattgatatagtaattttagataatttagagatataaaatttaaaatgttagataaagttcaaagtataacctaatatcaaaacttcacataattttcatattaattatcaattaaattcacacacaagagttattatataaacatagaagatagtaaaactagcttaaaaacataatataataccctatacaaaatagtggcaactctccctcacatcctcaattgttgccactattttaattttttgtaaaaaacaaaaaaactccacaaagtggagtatttataaatttaatatactcttttaatagtatgctttactatactttaaaacaaacagaatttttaatctcaagttttttatttatcttagcaaccttaatcttaatcttatccttcaaaggaatacatcctatattactttcactttttacatcaacacttccaacaaatttaccagagtcattataatactttgcaacaccaacaatatctcccttatggataggataattcatatttttaaacactaccttaggattgatattttcgttatctgaaacaacaccatacaaatctttatcaaccttaactgttatcttaaaatcatcaataccatcaacacaaggagtctctataatatcacccttatgtgctatctttttagaatggaaattatctttaccatatttcaataaagtagcggaagaagaaattctatttttcttgttaccatcaccaagtacaacacctatcaatctatgatttctttcgtttttagcatctttaggtaccatcatagaaaatgcaaggcaatatccagcattatctgtatagcctgtctttattccatcaacaccaggtactgaaacaagtaggggatttgtgttataatgtgtaaaatcctttttagtatcattatatacttgcatagtggttattcttgtaacttgattttcataatggtcatacatatactttccaagtgtaactatatcgtgagcagttgacatattttcaataggaggttctttatgttctgggtcagtatatataggaagcccatttggattaaaataatacgtatcaatcattcctatttcttctgctttcttgttcatcatatttacaaaattcttttcagtcttaccaatatgtttagctatggctatagcagcatcatttccagatactagcattagaccctgcataagctctcctagagatatttcatcaccatctttaagtttacaagtagaacctcctactgaagctgtagacttgtctattttcaccatatcagtctcttttacttgattcttatcaactgcttctattgccaataaaaaggtcatcattttacttaaactcgctaatggcattttttcatcaatgtttttttcaaataatattcttttagtttcctggtctataagtagtgctgctcttgaagaatttggtactggtggagtatctgcaaatgcaaatacaggagttataaatataaaaattaatgcaagtattgttaactgttttatttttcctttcaaaatctcgtcctccatttcatatattaattaatatgcacaaaataagtgctataaattttatttatttagatactcattaatcatgtctattatataagcaatttcttcgtctggtatcaaaatattaaaataagcttctgttggcttaaaggcttcacgtattaaactatatagttcatgatttttactaattaattcagtaatgttattatatggaaaagttgtatttttaaaacatctttctatcataaaagagcaatgtagtatatatcctagcttaaatttgctctttaagttttcatctattaattctattattgtaaataaggaagaattgacatagttgaataatttaacagagtccaaaagttctaagttttgggtcataaagtttattattaaactgttgtatgatagatttgtttcttttatatttgtaatactattggcattgaatgtaccttctattattttgtttagcatatctaggccatatccatttagtaattcctctatgtgtataaaaggggtgttggctacattaaaatctacacttccaacaactgccagaattttagtattactaaatttattcttatacattttaaaactttctatattatgaggaactaaattaatattgtatttacgaatatttttaagtgaagaatttataaagtctgctactttcatagctgaaccatatcctgttatacaagtagttattattacatactctcttgacttttcaggatagtttatttctgttgaatcgattgctgctcgtccaatatatggatttaaagagcttaaggaattagctaattcatccaaagtcatttctggtaatgtactttttcttactgcttctaaaactattggagtagataccatttcaattgagcgagttttgatttttgttttttctgaaataagttctccaaaagctataagagagcccatatctgttaaaagaagtacacccttaccttcgtcacattcttttaccaactctatagttttatcaagtatggtacttacttttacatcaagaggcatgtcaattgcattacaatggtttgtaccaagcaatgaatttgctacatcacacatactgcttgctgttgaatttccatgagcaagtattatgactcctatactttcagattgattgtttggttcaagatacatgctatttagaaacatggatataaattttacttcatctttaggtaaagatgtttgtaagtcattttcaattatacttaaaactattttagatatatttaaatctttatctaagaaaattttatcattatataaattgtacttaggattataggtgtcttgatttatattttctataagtgcacttatatgcattgaaagagcaatataagtttgttttgtgtatttgtttctcgatattttttcggcctcttttaaagaatgttcaacagcatagtaaatctttggattgattactttaaaaatttcattacttgtataatcagaatgagttactgaagatatcgaaagtaattttgtagagtacttttccatgtaatttataaacatactccttatatcattttccagataaggaatctctgtagagtatttaaatccattgtttgatgtatctatattgtatttagatagttcttttgtatattcaacttctaagttattaccattaaattcataaaaaagcatataatcaagttctgataatttatttagattactacgattttcattcaattttaaaagaccaatatagatgtaatcaggaacaagggataaatctatttctatattatccttaagtccagttttgtaatttaaaaaggctcttgcactcataagttgtatgtcagatttaagctgacctatattaccaaaacaatcataaaggagtaatgatttaattacatctttgtgaacttttatagttgcattggtgtattttgattctataataaagaagtatttaataagagataatctttcttttaaagacctatcctgtaaagcaggtaggttgattgtaacagggattcttcttaaaaaagtcccaagcagagaagaatgtatatcttctgttgtggcacacacaataaagacattagctttgtgcacaatgtcagattctcctaatcgtctgtatatgcctttgtccatcaaaagaaaaagcatctcttgaccttctggtggtaatctgtgtatttcatctaagaataatatgcctccatcagcctgtgcaactatgccgaatttatccttattagcaccagtaaaagaacctttgacataaccaaataaattacttaataataagttagcattttctgcatattcagcacagttaaatactacgaatttgctttcagaagaaaagattttactttctacagcatatttgtacattgtttcggcaaatgtactttttccaacaccagtaggtcctatgagtaacgtattaagaccttttggaggatagagtatagcagatttagctttttctataggtagtttaagactagaatcatgtccaagtaatgttgaaaaaatatcttctgagtcatttttacttgatttaagtagctcattacaattatttatagaaaattcatcactgttcaaagtacggccaattaaattttctataatactaacatgtagaaataaaattggcttaccagatattttcagaacttttttttcattatataggttatttaattctttactggtattacttctatcaagagatgaatggttagcaatttctattgtagtgaatcctgttttatctgattgaaggtcttttaaagtcatattttcacataatttatgtagagataatagaactttatcttttcttagcatataccatttcctttctttatgtttaaactatatttaagctacattaaatatattataatatatattcagtattaaaataaggtttatagtggatattttgtattttactttttaatatgttgttttgtgtaatagatggtgttaaaataagagttgcattatattaggtatggatttttatagattaaattagagtattatgttgttaaataactaaatttaagttttttaatatacttcagtctatgtaatatcatttattagtatatggtcaatgtaattaatatatggtcgatatagatgaagatatatgaaaaaactgataaggttaagaataatttatatatacacagttaatacatatatacgtttacaaattatattttgtatcataaaaataatgttttatattgtacatatataaatatgaagttgctataagcttaaatactcaagagaaagaattaaaagagatataattttatttgtagtaaaaagttatacaatttagaaggttatataaatggttgaaagtgtttgtcaaatattaattcagccattttatggtgtaaacaagcttaaaatttgattttgacaagcataaaaaacaagttttttcataaaatgtaaatattggatatgaattatttaaaatagtttaaataaataatatcttgtattaaaatatgaataatactataaaagaatgggagatatgttttgtggatatagatagaattttaaacttttcctcaaatgcaggtaaagctatgttgcaaagtggaggagaaacctatagagttgaagaaacgatagctagaatatgtcaatcttttggaatagaccacgtagatgtatttgcaactccaacagctgtaatggcatctgtatttgtagatgggaaattacattcagcaattaaaagaataagctcaagaagagtagacctaaacttggttcatgaagttaactcattatcaagagcaataagtataaataatttagatattgaattatgtgagaaaattttagatgaaataagtgaagataactattactcggatttaataacaatattttttgcaggtattgcagcagcaactttttcgatattatttggaggaaatgtggaagaatttatagctgcatttactgttgggattctgactaagtttgttattatgtatttaagtaaatcttcacttaatgacttttttgtaaatgcaattggagcagttattatagcttcttgttcaattttaattttaaagctcggatttataaagacgttagaccatttaatagcaggagcaataatgctcttagttcccgggcttgctttgactaatgcattaagagatttgttagatggacagttgatttctggtcttgcaaaattagcagaagtattttttgtaggtgtatctatagcagtaggaatgttcttggtacttggattatacttcaagttaggggggatataagtgcatttgtttatagaagtaatagcagctttttttactgccttaagctttggagtgctatttaatatgaaaggaaaaaacttaatactagcaggaataggtggaagtatagcttggttttcatataaatttcttttaaatatgggagtaacagaaaacttatgtttttttatagctacagtttgttttgcgatatattgtgagttatgtgcaagaatttatatgactccagcaactacattaagtgtttgttgtttaataatattagtacctggttatggaatatataatactatgtattctgttttgaccaataattatataaaagctgtagaatatggggtgagtacattatcatgtgcaagttcaattgcattaggattggtatttataactactgtatttagaaaagtcaacttatatggagtgcttacaaagataaaagaaaatgaaaaatataaaaagagtataaataaaattaaacaacaaaaatagaaaaaattgacttttaaacaaaaggatgataatataataacataaaatagaataagagtatccaaattaaagaggatattcttattctataaacgtaatttttttttatttcaaaaaactgacaacttgcattacgagtgtaagttttagaactcagtttgtaccaaaaaatttgtaccaatgttaggaaccttaatttaaaattaaaagggggaagatttcaagatggaaaagctgtcggataagagaagagtcaaggcagtaagtatggaaaccttcgtatttattgtactattggcggtaggatttggatatgtaggaagcatcatgggtgcaggaatgatgtttaaagtaataatgagtacagcacatgcgcttttattagacacagtatttttaataatggctatggcagttcttgcaggtgcacttagtgcgttgctttcagagtttggagtaatatctttagttaataagatatttaagggtcttatgagacctatatggggcttacctggtgctagtatagcaggagtagttgcaacatatttatctgataatccagctattataccatttgctaaagacaaaacatttacacaatattttaagaagtatcaagtacctgctttatgtaatttaggaacagcctttggtatgggacttattgtaacaacttttatgatagctcaaggtaaagaatatgtactaccagctataataggtaatgttggggcaataataggtagtattattagtgttagaattatgttgacttttactaaaaagtattataattatgaccctaaaaatgatactgaaaagcaaataaatgataaaggtgcaaaacttgaagagtttagagaaataagagatggtaatgtattccaaagaacattggatgctatacttgaaggtggtaagctaggtgttgaaatgggtatggctataataccaggagttttagtagtttgtacattagttatgttattaacttttggaccatctacagaccctgctacaggtcaagctgtttacacaggagctgcatatgaaggtataaaattattacctgctattggtgataagattagcttcataatagaaccattatttggattcacatcaccagaggcaatagcattccctgtaactgcattaggagctgttggagcagcaatatctttagtaccagagtttataaaatcaggcgctataactcctaatgatatagcagtattcacagcaatgggtatgtgttggagtggatatttaagtacacacataggtatgatggatgctttagatgcaagaccattggctggtaaagcgatactttcgcataccataggtggtttgtgtgcaggtatatgtgcccactttatatttatgcttgttggatagaaatgttccataattgaagtattataatttataaaattgaataaaactattgatttaagtatgtaaaaactaaattagtaatttaaatatataggtgctgttttgaaatagagatttattttcattttaagacagcaccttttagtaatttaagtacattaattaaatgtattgattgaatttattatgataaaattgtattatataaaatagagccaatttaaacagtaacaataaggaggaattgtagtaaatgaaaaaggaacgactacaacatgaagacttaaaagagtatgattatgatgaagatggctatctcagtaaaaagataattattaaggacttcataaaaactatattggttatgacaattgctactggaatatcagtagtttttgaaaaggtaggttttaatgaatctaatattatactagtatacatattaggtgtactatttgctacaagtataacctatggatatttttttggaatactttcttcagtaataggagtgctatcatttaattttttctttacgcatccattatatacttttttagcttatagaaaagattatcctatgactttttgtattatgctaatggcagcaattataacaagtactttaacttctaggataaaaagagaagtgagactttctcataagagagaaaaaatgataagattgctctatgagaataacaaaacgttgcttaaagcaaaaaataaaaatcaaattattgaattttgtgggtctaatttagtaaatatattaaatagaactgtaatagtgactattgcagatgagaataataatctaggtaagccaagtatttatatttgtaacaatgatggaagtgagaatatattccattcagtattagaaaaagaagctataaaagaagcttttaggacaggtaacccagttggaattgggacaaaatattgcaaaaacagcagtgcatattatttccctataaaaggtcaagaatcaaatgttcttggtgttataggtgttgcgtgttttaagatagatattattacagaaaatgaaaagatactattagaagcagtttcaacacaggttgcgttggcaattgatagagaaaatttatttgagaaaaataaaaaagcaaatcttgaggcagagagagagagattaagaggaaatttgcttaggtcaatttctcatgatttaagaactccacttacaagtatattgggttcgtcttcaacaatacttgaaaatgatgatgtgatagataaagaaactagagtagaattattgaaaaatatatatgaagatacgagttggctaactcattctgttgagaatatacttagtatgactagaatagatgaagggaaattggatattgaaaaacgaccagaagttgttgatgaaataatagctgaatctatattaagagtcaaaaagtttgccaatagtagagacataaaaaccaatattccagatgagataataatcgttcatgtggatgtattattaatagaacaagtgttagtaaatttaattgataatgctataaggcatacacctaaaaattctaagatagaactaactgtaaaaaaagagtcaaatcaagtgctatttgaagttgcagataatggaaaaggaataccaaatgaagatatcggtaatatttttaataggttttatactaagaataagtctagaaatcttgaaagaagaggtattggtcttggattggagatatgtaaatctatagtagaagctcatggtggagaaattgtcgcatttaataatccttctggaggagctacatttagatttagcatacctatgtatgatgaggaggggaaagacaagtggaaataaagccattagttctaattgtagaagatgataagccaatttgtaaatttataaaagtatctcttgaaactcaaaattataggtgtgtagagacagataatggaggaacagctatatcacttatacattctcttgacccagatttgataattttggatttaggactaccagatattgatgggattgaggtaataggacgagttagggcatgtgcaaagactaataaaataattgttgtttcagcgagagagcatgagagggataaggtggaagctttagatggaggagcagacgattatttaactaaaccttttagtgtaacagagcttttggctagagtacgtgtggctcttagaaataaagctcaacaggataatataaataatgatgctccaaagtcttttgaagttaaaaacctaaagatagattatgaaaatcatattgtgtcaattaatggtgaagaaatacatttaactccaatcgaatataagattattgagttgatgtctaagtattcaggaagagtcttaactcataagtttataatagataaagtttggggaaattactatgaaagtgaaaatcagtcgcttagagtttttatggcaagtataagaaggaaaattgaaaagaatcctgctcagccagaatatattttgactgaggttggggtaggttaccgtatggcggatgaatagatactaaatgattagttgctgagtgattactaaatgaatatgagtaataatcagatagaaattatttgttatgtaagaaaatctaagtattttaaatcgaatacaaatagctatgtatattttacaatgaaatggatagagagttaatctatctaatcttgaatttacatagctattttatttttttaagagaatacaaagtggatgatgtatttctgtaatagaaaaagtatccaattttagactaattacttatgtaatattaacttgtaaagttaggatttgcctatttcattttttcttagttttgacttgtcttacagctatcattgtagttgcaaaaaaactcaatgttgcaccagcaaatgctgggtaatgtcccataaatccagcaatacaaaaacatattcccactacaaacaacaagaaactaaatattttcataactattctcccactaaaatttaatttattaagcatattttagcagatattaatagtaaaatcatcagttttgatgacaggaaaagtatatcatattttatgctttattatgtcttcttcgttgattacttattagaccacactttttaaagtgtgctaagtgttgttttgcaacaaactcttaataactatatgctaataagtgtaagggaagtaagtagaattgttaaatatagcatctatatggataatatcaatttatatatggataatatcaatttaacattttttttgatataaaaaaattaccctttttgtctttttatatcagcctttgtgatattatataatatatcaaagtaacaatctagataatttattattgaagaaattttaatatataatagttttatatttttaaatgaatgaagtattatcttcatatatgattggaatacttaattgaggtggagatttgtcatttatatgagaattaattgtaaacacataataagatagttaattataaatatattaaattaggtattacaaaactctattgtacgattgacacaataataattctatttactaaaaaatagaactttattaaggtactattttaaaacataaagaagtataatatcattgccaaatatatagcaaaattttaaaagctttaaaaattcaatctggaaaatgaataaaaggagatatatataaatggatgtaataaatttaatagatgagttggatgaaattgtatatgtttcttctttagatacatatgaacttttatatattaatgaaattgggaaaaaggcaatgggaattaatgatatatcccatgtaaaatgttataaagcattacaggggaaagattctccctgcgaattttgtacaaactctattttaaaagaagatgaatattacatatgggaaaatacgaatactcgaacaaatagacattttatattaaaggacaagttaattaaatgggagggcaaacatgcacgattagaaatagctcttgatattacagaaaaggaagatataagtaagtcaatagcagaaaaattagagataaaggagttattagttggatgtattaaacatcttataacagaatctaatttttctgatgctgtaaatcttgtattaaccaatattggtaaatttcataaagctgatagagcatatgtttttgaagtatcagaagatagaaaaaaagtaactaatacatatgaatggtgcaatgaaggtgttgatgaacaaaaacaggcactaacaaatcttgatattaatgaattaaagaattggtttttattattcgaacaaaagggttttgtaataattgatgatatagaaaatataaaagaagaacagccaatagaatatgaaattttaaaacctcaaaaaattgaaagtttaatgacatcttcactaaaacaagatgataaagtagtagggtttattggagttgataatccacataaggctgttggagatacctctcttttgacatccctatcttattttttattaactgagatgaaaaaaagaaaagtagaaaataaattaaattatatgagctactatgacttcttgactggtgcatataatagaaacaaatatattaagtatatagataattttcaaaaaggaaaatttaaatccataggagttgtatttgtagatataaatgggttaaaagatattaatgataactttggacatgctaatggcgactctgctattgtgtcagcatgtgtaataataaaaaaatactttcattcttataatgtttaccgtattggaggagatgagtttattgtattatgtgaagatatatcaaaacaactatttgaagaattagtgagttggttaagtgaagaatttaaggatgagatgatatatagtgtagcagtgggcagtatttggagtgacgataatattgatatacataagctaattaaagttgctgatgagagaatgtaccaagataagaagaggtattataataagaacaaacttagaaataatgaaatggaagtaattagtgacttagctgattcgacgaataatattttatttaaacataaagagttagttgataaggtttattttgatgatttaatgataaaagggtattctaaggcttatgaaaaattagcttataatacatatgatataattttatctatttgcatcgatactaatttaattactccaatttatcaatcagagagcaatatttttagttttcctataaaggaaaatcttgaaaaaactttttcatacataaaaaaacatttaattcatcctgatgatataatattatttgatgataaccaccttctaaaatctcttgatagtcttaataacagcaagcaagacgatttagaactaaattttgagtatagacgtttaggaatagataaaaagtactattgggcattaatttatatgttaaagattagtagtaaaaataagttaggtgagaaacaaacacatattttagttgctataaaaaatatagattatcttatgcaactacataaaaaccaaaaggatatattaacaggactatacaattatgaaagtttttgtgaacaaacaagtttaatgcttaaaagatatcctgacaagagctatgcaattataatgatggatatagataagttcaaggtaattaatgacatttatggagttagaggaggagataaggctttaatatatgttgcagaattgattcaaaaaaacattggttctaatggtatatgttgtcgtatgtatgcagatgtattttgtattttttatgagagttactctgatagagatgttcataaattaatttataagattaaaaatagcttaaatagaaaaaaatttgaatatatgttagtaccatgttttggggtttataaaattttggataataatattccaattacaaatgcgtgtgaaatggcaggatatgctcacaaaaaagtaaagaaacaaagtatcaataactatatattttatgatgatactataagaaatgatgcacttgaagaaaaacagatggaaagggaaatggaatacgcacttgaaaatgggcaattccatgtatatctacaacctaagtataatcttaatgcaaataaaattgttggtgcggaagcattggttagatgggttcatccagaaaaaggtataatacctccaattaaatttatttcactatttgagaagaatgggtttattatcagattagacatgtatgtgtgggaacaagtatgttctttgattagaaaatggatagatttaggtgaagagccagttcctatctctgtaaatgtatcaagattacatttgcataatccacattttaaagaaattgttttaagtttaataaataaatatagtataccaaaatcttttttagaattggagcttacagaaagtttatttattaaaaatataaaattatttactaagataatagccgaccttagaatggatggtattgttttaaatatggatgactttggttcagcatattcttcattaaatatgttaaaaaatattaatattgatacattgaagatagattgtggcttctttaatgaggaaggaatcacagacagagaaaaaatagttttaaggcacactatagccatggcaaaagatttagatatggatgtagtggcagaaggtgtagagacaaaagaacaagctgaatttttagtgagtttagattgtgtggtaattcaaggttattattattgtaagcctattccaagtgctgattttgagaagttactttatcaaaaataagctaattatcccactctaaatgtaggtaggatggagtagttcaacataattaaatagaagtagaaaatagtgaggatataatttttaaaaagtataatatttatggattaggagcgaagtttatgatagtgggtattataggtccttcagactctgggtttaagataaaggatgatttaaaacagatagacagtgatttaaagactaaaatatatgtaagagaaaaagtagtagatacaatagaagttatttctaaatgtgaagatgaatgtgatgctattatatttacaggatgtgcagtttatgaatttataaaatctaagtatgagataagtaagccacattcatttgtaccgagaagtgggacgagtataatgaaggcattttgggcaataaaaagtgcaaatataaaattagataaattcagtatagatgtagttgatagatatgttgtggaagatgcacttaaagaatttgatattaaagcaacgagtgtattttgtaatccattttctttggaagtaggagagtctgaacttgtagaatggcatataaaattatttgaagaaaataagacggatataatgttaactggttttggtgcagtatataatgaattaaaagaaagaggctatcctgtatttcgtttacaagctactatacaattaatcaaagaaagttatgataaggtaaagagtgaatatgctctaagcaaggcaagattttctcaaattgctgtcgaaatattgagtctaatagattataaagagaagatagataactattattctgacatgataaaaaaatcagatatggataagcttgtagtaaactatgtaagaagcattcaaggttccttatttttacttggaagaaatgattatgttgtatttgttcataaaggggtagctgataatgagtataattatgataagctattcaatctaaagagagagataaaagacatgggcttttctcttagtataggaattggtactggagtaactgcgtatcaggctgaaaataatgcacataaagcattaagacactccatagattcaaaagaaattggtatatatttggtagatgaagatgaaaatataagaggacctttagcttccgaaaatgaattaaattattctttgatgctatctgatgaaaaggtaatagaaatatctaaaaagactggaatgagttgtgagtcagttgcaaaaattattgctataagtgagaatagaaaaagtaagatttatgattcaaaagagttagcagagtatctaaatgtaagtgaaagaagtgcaagacgtatattaaataaaatagtaaatgcaggtttaggtcgaatatgtgcaaaagagactagtattggtggaggaagaccaaaaaatattactgaaatactgttttaagatattttataaaactgtataaatcattatattttataaaattctacaacaaattactatataaagtattaaagcttatcatgaaaaaaattagaacaaattattatataaaatactagagcttgttattaaaaatactagaataaattattaatataaaatactagagcttgttattaaaaatgctagaacaaattattataaaaatactaaagcttgttattaaaaatgctagaacaaattattatataaaatactagagcttgttattaaaaatactagaacaaattattatgtaaaatactaaagcttgttattaaaaatactagaacaaattattataaaaatactagaacttgttattaaaaatgctagaacaaattattatgaaaaatattgaagcttattatgaaaaatgttagaacaaattactatataaaataccaaagcttattatgaaaaatgttaaaataaattattatataagatactaaaacctatgtaaaacaactttaatatataacttataaagttgaagatacataggtttttatttttataatttaaagaggtatattatgatatttataatttaatcatatgataaactattttggcagtatcatataattcgtctatatttacatattcattaactgtgtgtacatcatacatacctagacttaatatagcacaattatatccaagattagctaatatatttgcgtcacttccaccaccaattaccattggatttggaacaacaccaacttgtcttattgcttcttcacttaacttgaaaacgtgactatctctactaagttcaaaactagggtaagacatactatgttcaaaggtataagtagtattaaatttagatgcagcatccttacaacatttttccatatgattaagctcatactctaaagtttcaggtatatgagacctaatttcagcagtcaatgtaaccttatcagttactatgtttgtagctccaccaccttctattttacctatatttgaagtagtcaatggatctattctgcctatgtgcatattgcttattgcatgagaggctactaatatagcatttaaccctttttcaggttctataccagcatgtgctttctttccatgaaaagagatttttatagattgttgagcaggagctttgtatgctatcgaaccaatagctccaccagaatctaaaatcaccatatctttacaaggcaagttgtcaggattaaagtttttgacaccatgcataccagcttcctcacagattgtaaaacaaagataaatatctctatgtggtattttttctgtagtaacatgttctaaagcttcaagtatagcagctattccagctttatcatctgcaccaagtgtagtagttccatcacttctaactacattaccatctagtattggttttacacctaaacaaggttgaacttggtccatgtgtgcacataaacaaagtggtctacttccttcttcaccttttatataggcaatgacattacctgtattaccaccatatttttcacctgcatcatctataatggcatctatatttctttcttttaagtagtttaccaaccacttagacatttctaattcttgattagatgggctatcaattctaaccatatccataaaattatttataagtctatttttatctaacataaattatttctccttttagaaagatttaaataaattacatgctatatgaaggaagtattccaggtcctagtggaatattaaataccataaacaatattaatagtatagtccacactattaagaatgatatagagtatggtatcatattagcaattacagtacccataccagcatctttatcgtattttcttgtgaatgctagtataatagggaagtacggaaataatgggctaagtggatttgttatacaatcacctatacgataagccatctgagtaagtgctggattgtatccaaccatcataaacattggtacaaatataggtgcaagaatagcccactttgcagatgcactacctataaataaatttataaaacatgataatataataaatcctatcaacaataaaggtccatttattcctgctgattttaaaaattctccgccctttacagctagtatcagacctaaattactatttgtgaataattgcaaaaattgtgaagcagcaaatgctagtattatatatccacccatatcactcattgcactagccattatagagactacatccttatccttctttattttacctatagtttttccgtatacaacaccaggtatgaaaaatgctagtgctattataggtaccatacctttcataagaggagcattgtttgatagtaaatctcctgtttctgggtcagctaagaatggttttttaccgattacactaagagctactataatagctacatatattaatatacttataccagcttttttaagccctttcttttctacatcactaagacttccatcaacatctagttctgcatttccttcatatttaccaaatctaggagctacaattttttctgttacccatgttgccaaaagtattagaacaaaagttgatgctatcataaaaaataagttcattgttgcattggcttgaaatccagaatcaatcatttgagctgctggaactgtaaaacttgcagcaagtatatcattgacacttatcataatgtttgcggcaaatcctagacagactgctgcatatccagaaaataaacctataagtggatgtctaccaacaccaagatatacaagtgcagctaatggtggaaataatattgtacctgcatctgaagctatattggcaagcatacctatagtcattacaacaagagttactcttgtttcaggaatcttgcttactgatgctttgattgttgctgtcataagtcctgttttgtcacatacaccagcacctatcatagttactagaactagacccaaaggagcaaacccttggaaattgctaactatgtttcctaaaagaatttgaagctgttctacagtcaataaatttactgcagttatagtttctccagtaccaggatgaactactgatatccccatagaaccaactagactagatagtataagtaaaagtacacataaccctaaaaatattgtaactgggtctggtagtttattaccaacagtttctattctgtttaatgtcctgtcaaaaaagtttttcttcttaactacgttatcattcataatatcctccctaatgtttaaaaatataattaaaaaataagtattgtggttgatcttacaatataaattctgcttgtcgatttaagacgtgtccacaatatgtcctaaaaaaagtataaaataaactttttcctgtgtcaatgcagttttctgaattttctggttgagtggtgttagttaaatatgctttaagtagattaatgacgaattatatctaatgtatttaaatagcatatgcactttaaagttaattttaaaacaaaattttatgaaaagctagtggaagattaagttattaaaataagtagcgtagtaaagtgttagattttttaattaatcaaagaaatttactttgtattttctacaaaaatctgtgaatatcttttgaattatgtagaggatataaatttattttatttacatagattagattttgttctaatttactgtattcaaatggttttccatgtccaggataaatcattttaggttttgtattgatgattgttttccaagattgaataaattctagtttgctttctgcaaatatggtaattttgtgagtacttggaaatccattcattgcagaatctccacaaaataaaacaccatcatcaattagtagtgaaattgaatcagcagtatgtcctggtgtatctataatttttccatttagttctttttcaatttctttacgattcttgtcagacacaagaatacaccttttttcaaattcttgtttaagtggagaaaaactatgctcaccttttccaaatagtttcataatttggcaaaagagaaaggcagtacggctgttacaaccaccaataaaagagttttgacctttatatagaatttctaaagctttatcatgcataacaatctttgtattaggagattcgtctagaatctgatttagaaaaccaacatggtcatcatgagcatgagttagaaatatgtatcgaatatctttgatttttatgttgaatttagaaattcgttttttgaaatgtttaaaaccattttcatatccagtatcaatcaagacaaagccatcttgaatagggtacaaccatgtatttataattcgatttcctgcattaaacattttttcaccaccttgaattagaatataaatttatattaattagaaagaatatagcatagttctactgatattttaacgtatctctaaaagttttaaggaggataatatattttagtttaatctaaaagctaaaagaaaagaagtatactgttacaaaaacaaagagtggtataacttttacagtagataccaccctattataaaaatagacttataaagttttatcgtgtttttctaggaatgttagatattcttctttagtcataactggagtaaaggtatctaatatatctttagcatccttagcattatcaaaaagaaggtctacaactgtaagtgccattgctttagcaggaattatgtaagctaaatcttcatcaactatttcaaaatctcttgtatgaagagctccttttacaccaccaatcatagggtgaagagtaggcattatatgagacacatctccaaaatcaaaagagcctgtaaaatctccaccatcaataacttttccttttagacctaaatcttcaagattgtttttaaataaattatcaagacttttgtatcgtaatattggaagatatccaggaatttcagttatctcaacatcagctccaactgccattccaccagccatcaaagccttatttattctttcattagcatcaatcataccatttatagttctagctctaacatatgattccatatgaacatcagcaggaacaacatttactatatctccaccttttgtgatgatagggtggaatctaactctttcagactctttaaaagtttctctaagtgcattcacgttgtttatagcaagcattgctgcatttaaagcatttattccatcatgtggagcagaaccagcatgagattctttacctataaatttaaccttttttccaacaaatccattactctcaggaccaactagagccttatcttctcctaaatcagaagcatgaaacatcatagatatgtctatatcatcaaaataacctctttttattaattcttgttttccaccaaaataagttatttttccttctttttttaattgctctctgtattccaactcaataaactcttcagcaggagtagccataaaagatactttaccatctaaatgttctaaaacgccactttttactaaaccaacagcagcacctaacattccagctatttgaatattatgtccacaagtatgagaagcacctatttcattagcatctttatgttctttacatgatataccatccaattctccaagtatagatatatgaggacctttcttgctagaatttgcatctgctttgcatcctgtaactgctatatttttttctacagataaatttaattcttgctcaaaaaagtttgaaacagcttctgtagttttaaattctttatatccatattctggatttttgtatattccttgacctatttttaatattttttctctattttcatctatagtttttattactagagattttaattgttctttattcataataaattcctcctatattttaccttgaatacttaaaactatatgagctatactcgcacatgcaaagaatatagttgtaaatacaataagtgaaattataactattttccatgacatttcttttaaagcttctattttgtttccaacagaaattcctgcaaaagctagtagtggagtagttatagccataaagttaatattattagtgttagttaagaatacttcagatgttggactatatggcatactaagtaaaaggccgattatagttgcaaatccaaaagctggaaagattgatttaggaaataaatcttttataatcatagctgccatagcagctaatattagcatcaccataccaggaagagctgtaactatagatgtaccaacgctaattctttgtcctataagaattataactccaataacagacataaccaataattgatatgaacttttctttaaatttaaattagcaaacatttattagcactctccttctgtagatttaatttctttagtttttttatttctcgaaaatttaggttctaaaatcttatacataaaattagtaaatggtaaggatacaaaaactaagaatataattcctgttatactagacatcatattgcttgttgcagcataggcaagtattgtatctgccatttcaggtggtaccatggtagataatgaaccagcagctgctgtcatcatacttccactaccaacaccacaggccattcccaaagcatatgggtgaagaccactataaatagatattgaacctagtacactaaagtatatagtaccaagaactgttcccattaaatatgtaccaagtacaccactaccttctggtgagtttatcccatatttttctgatataactcctaaagaaggttcacgacttatacttgcagtagctccaacagcttctcttttcattccaaacattaatgcaagaggtaatgcaacgattggtgcaagtatatgaccaaattcttgagcgataaatgctggtccagcttgaattattttgtcaatgtttggtccaactgtagtaccatattttataccaagcattactagtgcaattccaacaacttcaccagcaatatttatttctttttctccaaccacttttttaagtgctttaatttttttacctaataaatctggtgttattataagtccaattataactgcataaagcatagggaacagtactatagaggcttttccaatagctatagttctttgccctataaattcacatattactaccaagattaagcaagttaaaaatacttgaataaaatgttttttattaatttccatgatttcctccccaaaagaataaatattttacttatctgaaatgagaaaatacgttttcttaagtataatacgttttcctaaataaaatgaaaaaactatttcaaataagtttcagaaatgtcaataacatgtccttaattaaggataaaacaaaaatttaacattgtcaacgaaaaatatctaaaatattacatattttgaatatattgtaatatagctttattatgaaaaaattgtttaaatattgtaggaataatagctaaaaagctttaaaattagtaatataaaattgaaaaataataatatagagttgagaaatagtaaattgaaattttaaaataaatgagtggaagtagcttagtaaagtatggaaatgaatattacaatagaaaataaataatatgtaaagactttaaattaattttaagtattaagtacaaatactaatttttgatatagaaattgaataaagtaaatgataataagcaaatgaattaagatgataataagtgaattgatatagaaataagtaaattaagtaagatgataacaaatgaaatgataataagtgaattgatatagcaataagtaaattaagtaagacgataacaaatgaaatgataataagtgaattgatatagcaataagtaaattaagtaagacgataacaaatgagatgataataagtgaattgatatagaaataagtaaattaagtaagatgataacaaatgagatgataataagtaaattgatatagtaataaataaattaagatgataatatccaaagtgagaaagataatagaaagtaaataaaatcatgtaagaataatttagataagattctaagattttatttatttaaaaattagtatgattaatttagattaaataaatttaataattttagtaggtggtaatgaatgaaaataaatagattaacagaaataatagtaattctattaaataaaaaattagtaacagctaaagagttggcagataggtttgaagtttctacaagaaccatatatagagatatagaaactctgtctatgtcgggagtaccagtatatatgacgaaaggcaaaggaggagggatatctttaatagaagaatattctatagacaaggccatactgtcaaaaaaagataaagagagtttaatagttgcactgaaaacattacaggcgactaagtatccagaaataaattcagtagtaaataaaattggctcaatatttggagagcagaatttttcaaactggattgaaatagactttactgaatggggaagtaattttaatgaagatgataaatttacaaaaataaaagaagctattttaagacgtaatactataaattttaattatgtaaatagtttgtcaagccagacaaacagaactgtcgaaccactgaagcttatgtataagagtaagacttggtacttgtatggattttgtaaactaaaagatgattttaggatatttagaattagtaggataaggaatttatctataaaggatgaagtattttcaagaaagataatagaagaagtatgtttgaatgattctaaagtaattaaggaaaatactataacgttgaaattgaggtttaaagaaaagatgctttttagagtatttgatgattttaataaggatttaataactaaaaatgaagatgatacatatgatgtaattacagaatttcctattggtgaatggatttatggatatattttatcgtttggtgacaatgttgaagtacttgaacctaaagatgttagggataatgtaataactagactaagggagttgtctaaaatttattcattataatatgatgctagattaaagattttattaaatatataatatcttgcatttagtatataatatctcactgagtttaattatattaaaaatatgacataaaggtgtcgtatattataaattataattgaattagttcaaaataaaatatattaataaaaacaaagtgaggtataaagtatgaattatgaaatagtagagataaatgagaaaatagttataggaatatcgaaggagactacaaataaagatggacaagcggtaaatgctataggtgaattgtggaaaaaatttatgggcaaagggatatataatgctataaagggtaaaaagaatgacaagacaataggtctatatacagattaccagggtgattttacaagtccgtatagctttgttgcatgttgtgaagtaaatagtaattctgataaagagaagaatttagaagaattaaacactaataatactgttggagaaagtattattagtaaagttatactagcaggtaagtatgcaaagtttgttatagtaggaggtcaaaaagaagtaggagatttttggtttaagttttggcaaatggattttgataggacttatataagtgattttgaagagtatcaatgtaatacttttgatacaaagaaacaagaaattcatatttacataggaataaagtagatttgttattactatattgaatgaagtattgagtatagtacatttattatagatagttttactatttataactataagcagtaaatctgtaaaagatttactgcttttttagtaattaatagtatcagtatcactttgaatcttcagacatattcgtcatttaatattgtttattgataaatgatacttgtaaatataatgatttgttatttaatttaaaatatgaaaaaaagtattataaacacattagaatacttctggatttatgagtatacaatttgaaaaatataaaaaataatgtataaagctaaatctaatttaatcgataatacatatagagaaatataattaagtaaataaacaactatctattagatattgagaaagtcaaatcctatatgaatctacagaaatgattttaatgaatctgaaaaaattttttatacaaacataaaaaaggtataaagttgttttattataatttgattacttttgataactttttatgttttatacaattatatttttaataactcgtcaaaacgccaaacatatattacaatagatatataagtttttttgttgacaaattatgttaagagaattaagtataatatggcataaataattacttttatttatcaatgaaatgtatttattgtgtagcgaaaaatagtcagatagtatagacaataactgaagataaaagcgtttattgttgtacatatggaggagttagttttatggaaaataaaattttgatagtagatgatgctatttttatgagaatgataattaaagaagctctgagtaaaagtggctataataatttaatagaagcaaatgatggagaagaagcgtgtaatatatttaaatatgaaaagcctgatttgatgttgcttgatattacaatgccaaaaaaagatggtttagaggtgctaagagaaataaaaaagttggattcaagtgctaaggttgtaatgtgctctgcaataggacaagagaatatgattgtagaagccataaaacttggagcgttagattttatagtgaagcccttcaaaacagaaacattagttaaagttgtaaataatgttttaaaataaaagtgtaaatatacactgatacaatgaaaagcaaataaatgcaataataaaagggaggggtttatattataaattatttagaacttgatgatgttcatatagatgctcttagagaaattggtaatataggctctgggaatgcaattactgcacttgcatccatgataaatagcaatgtagaagtattaatacctatggtcaagatacttgaatataatgaagcgacaaatttgcttggtggtccagaaaacaaagtagtatgtattttactcgatatgaaaggtgatatcaatggaatgtttatgtttttgttggatgaatcaataactcaacttatgctaagttctctttttaataaagaagaagcttttttagatgagattgaggcaattgaaatttcagcaattaaggaaataggaaatattatggcaagttcatatgtaaatgctattgcatctatgttaaacatgactataagtgtttcaattccagatatatgtattgatatggttggagctgttctaaatgtgcctatgataagattttcagatgttggtgacaaagtcttatttatagaaaataaatttaaaatgagtgataattattttactagccacattttgatgattccagaaatgagctcacttagagaaatactcgtgaggttgggattagaagtatgaatagagagatagtagtgaacattgcagatatgaagatagcctatagaccaaatgttttagttacttatgcacttggctcttgtgtaggagtatgtttgatagataaagtagctggaattggtggaatgttacacgttatgttgccatatagtaaagatgctattaacattgaaaataagtgtaaatttgctgacacaggaataaatgagctcattaaatctatggagaatataggtgcaaatagaatatatataaaagcaaaaattgctggaggtgctcagatgtttttaggaagcagcaattcagtaattgcaagtataggacataggaatgttgaggcagtaaaaaaaactcttttaggattaaatattccaatattagctgaggacacaggtatgaattatggtagaacaatacgtttttacactgagacgggtgaattacttgtagattcaataaataaaggtaagaagaaattataatatatatttcatagaaagtgtattttaggagggaggtattaaatgagatttccagatgacccatatttagattatggactaattgatgaaggaattaagtatctaaagtttaaagtagatgagcaagattttggggttgaacttgaaaaggtaatagaaattactggaaatcaagaaattatatttattccagaactacctacatattctaaaggcataataaatctaagaggaaaaatcattccaataatagatatgcgtttgagacttaaaaaagatgaattaatgactacaaattgcatgtatatagtagtaactgaaataaaggacttggtagttggatttgtggttgatagagttgatgatatagtaagcttagaaaaaagtaaaatatcacctccaccaagagttactatagaatattcggattattttgtaagtggcgttggagaattagaaggtaaaataattactttactagatttagagaaacttttgacagataaagatgaagttttaatagatgaattaatcaatgggtttgattgcactatcatgtaacatagggatgtagttggagtgttattataaaaagattgtgatgagaacatttaagaatatagtggtataattattaagtataaaaattttaaatcattaaaatttgaatatattatgtttaagagaggtttgtatatgaaaaataagcaacagggaacaattttagtcgttgatgatagtgttctgatgtgtgacttaatagataaaacacttacaaaagataattttaaggttaaaaaagcatttaatgcaatagaggcaaaagaatttattgaagaatttataccagacattattttgcttgatataattttaccagataactctggttttgagttttgtaaggaagtaaaatctaatactcgtacagcagatatacctataatttttataacttcaaaaaatacagatacagacatagtaaaaggatttggtgtaggagcaattgactatatggtgaaaccttttagtatgacagaattaaaagctcgtgttatagctcatcttgaagtaaagaaatctcaagataaattaaaaaagataaataatgaactggaatcttctcttgaaaaattgaatagactcgttgtaagagattatcttacaggtctttacaataggcgacatataattaatcagcttatggagcaaagaagaattaataaatatagtgaaacatcaatatcccttatccttggtgatattgatgactttaaggttatcaatgatacttatgggcatgaagcaggggatttcgtgttaacagtaatatcaagtataataaaaaagaattgtagacaaattgatactgtatcaagatggggtggagaagagtttttgataatgctcacaaatactccaatagaaggtgctaagatactttcagaaagaatccgtaaagagataaaggagtttgatttcaactataaagaacataaaataaagtgcactattacattaggagtagtagaagtaaactcaaatatatcattagaagaaaacatatccttagcagataaagcaatgtatgagggtaaaaacttaggaaaagattgtagcgtagtgagtacaatgaaaggattaaaaaagatataaacttactttatgaaggagtacagatatgaaaagagaagtaaagctttctaaattagcaattgtattgctgattattatagtattggctgttctagcagggattttttcttctatttcatcttataaagcatttgaaaaagtagaaaaaagtattaatgatatgaataatttgaggactcaaagtcagtatataaaagatacaactagagagataagtgatgtattaagaagatatgtatttacaggagaaaaaaagaataaagatatttatgaaaaagaattatacggaaaaacaagagaatcagctttaaacaaattagaaaaaattggtcttacaaagagcgagtcaaataaaatcttagaagcaaaagaaatatcagattctttagtaccaacagaacaaagtgcaataaaggcagtcgaaagtaatgataagagtaaagctcaaagtataatttttggtagtgactatataaactcccaagagaaaatggattctttaataaatgaatttcaagaggatatagttacccgttcaaattccaaaattgtagaagtaaaaaaagaattacaaagtctaatattaagaacaatatttatactttcccttttaataatattgacaataatagaatatacagtaataaaattaaagatagtgattcctattaatagagtagaaaaacacttttcaagaattgcatctggggacttaagaacaagtatagacgttgaagaaagtaaatctgaaataggactattagtgagttctgtcaaaaagatgcaaagtatgcttttaaattacatagaccttatagacagtacattaactagtattgcaaaaggagatttaagagtagagatagaccaagaatttataggtgattttaaatcaattaaaatatctttagaaagtataataaactcttttaatggtgatttttctgaaataaatttatcagcagaacaagttgcaagtgcttcagaacaagttgcagcaggtgcacaagctctttcacagggtgctactgaacaagctagttcagtagaagaattagcttccacgattaatgagatatcagatggaattaagaagtgtgcagatagtgctagtcttgcatgtgaggtatctgaccaatctgcatcacaagttggttttggaagtagatgtatggatgatatgatgacatcaatgggtgaaataagtgaaaaatcgagtgaaatatcaaaaataatcaaaacaatagatgagatagcattccaaactaatattctcgcattaaatgcagctgttgaagcagcaagagcaggtcaatatggtagaggatttgcagttgtagcagatgaagttaggtctttggctggtaaaagtgcaaaagcagctcaaaatacagctattctcatagaagaagctattaaaacagtagaaaatggtgtcagaattgctaaagagactgcaaatgcattggacttggtagtaaatggtgtagaaaaaactactaattatattaatggtatttcttcggctgtacatagtcaagaagtagcaattacacagattttatctggaatagagcaaatttccatagtagtccaaatgaactcagcaacagcagaggaaagtgcagcagcctcagaagagatgtctgctcaagctcaaattttaaaagaattagtagaaaaatttcatctaaaggaaagtgaagtaagagaatcatcatgggtttaaattatgaggtgaatattgaagtaagagaattatcatgtatttaaattatgaggtgaatattgaagtaagagaattatcatgtatttaaattatgagatgtatatatattgaaataagagaatgattgtgtatttaaattatgaggtacatatagtgagataagagaatcatcaaggatttaaattatgagatgcatatataatagaaaattatttgtaggtcgtaggtgataaatgtgaattatattgaaccgagtatgagacaaatgttagatatgtttatatttgagacaagtttattactcgaacaattagatgaaattatgattcaaatagaaaaagagaaagtatttactcataacaacattaatgaaacttttagaataatgcatacgataaaaggttcagcatctatgatggggttagacaatatatctgctttagcacatagtgtagaagacttgttttatgctatacgtgaaggtaaaatagaagttttagacaatgacctattatttgatttagtctttcaatcattagattttataagaagagatatagatgagctacaatcaagaggttgtatatcttctgattactctaattttattgaaggaattgaagagtatgtgagtactttggaattatcaagttctatgaaatcaaaggataatgcaaatttagaaagtacagacgaaaaagaagcaatcgattcaaattttgaatacaaagaagactctgatgtagtaaaaataatctttgaacaaggttgcatgatggaaaatgtgagagcgttcatgcttgtatttgaacttagagattactgtgaatttatagatttttatccaaaagatgtagaaacaaatgcagagtctacagaatatattaaaagttatgggttttatatacaatttgtagctaaagaggataaggcaatagtttataaaactatagaagataatctctatgtaaaagaatacataaatattagtaaaaaagaaatagaaatgaaaaatacatcaaataatgatgcagtagaaaataaattaaaagataataataaagtaagtaaaagttatcaaaataactatacagaagatgagatacaagaagatgttttaaatgaaaaaactgatatggaaaaagatagtctaagtgaagaaaatgaacatttaccaataagtaagcagagtattatgagtgtaaatttagaaaaattggatttacttcaaaatatagttggagaaattgtaattatggaatcaatggttgtaaatagcgtaaattctacaggtgttgatatagataatttcaataaggcaacaagacaattacacaagcttacagatgaattgcaagatatagtaatgtctatgcgtatgattcaaattgctggtgtatttcaaaaaatgcatagaattgtacgagatatgaataaaaaattagataaaaatgtagagttaataactataggagcagagacagaggtagataagaatgtaattgataatttagcagaaccttttatgcaccttataagaaatgctatggaccatgcaatagagcctattgaggagcgtatagcgaaaggtaaagaagaagtgggaaagatagttttatctgctgagaatctaggcggagaagctgtgataagtatttcagatgatggtagaggcattatgagagataagattttggcaaaagctaaggaacaaggtcttcttaaacatcaaattaatgagtatactgatgacgaggtcaattctttgattatgactccaggtttttctacaaaagaatctataactgaattttctggaagaggagtaggcatggacattgttcgtaaaagtattgaaaaagttggaggttcaattgaagtaaaaagtaaacaggatgaagggacaacctttactataaaaataccattaactctttctatagtagagggtatgaagtttaaagttggagattcactatttactttaccaatatcatccataagaagaacatttaaacttacagacttaaatcaaataattacagaaggaaataagacagagttaattacaatatatggagcatgtattcccattataaggttacataaaatatataatattcaaacaaaagtaaccaatctgatgcatggtaatatgataattattgaaaatgagcataaagcagtatgcatttttgttgatgaaataataggtaatcagcaagttgttgtgaaaccatttccagtttatttcaaccgatttaatataaaaaataagggtttatcgggatgtacaatacttggggatggaagtataagtttaattatagatgcagatagcattatagaaatatattaggggatttaaagtatggctaaagatgaaattattaaacaagtattaacattttatgtaaatgatgttatttatggaatagaattagaaaatgtgattgaaaccataagatttcaatcaataacgtatgtaccatgtcttccaacatatataagtggagttattaatttgagaggaagaataataccagttattaatatgcatataaagtacaatcttcctaaagctgattataatgagagaacttgtataataattacaaaggttgatgagtatcaagttggaattattgtagataaagttgttgatgttattcatatagaaaatctaaatttactagagacgactaattctaacaacactaatattaataaagatataaaagagattgcgaaagttgaagataattctatattaattttagatattcgaaagtttttgattaatagcatatagttagttctgataaattagcaggaggaagtttttgcatgataaaactcacagatgaagaatttatagttcttgtaaaccatgtaaaaaaagaatatggtattgatttaagtaaaaaaagagcgttaattgaaggtcgcttatacaatacaatgatagagaaaaaacttagttcttttagtcaatatatgaatctattatttaaagataagacaggaaatgaagctataaacctaataaatagattgagtactaaccacacattttttatgagagaacctcaacattttgagtttatacagaatagtatacttcctttttgggaagaaaataataaaataagaaacataaatatatggagtgcaggatgttctagtggagaagaagcgtattcaatagctatgactttggatgattattttggatataataaagagttgtggaacattaaaatcatagccacagatatttcaactaactcacttgaaaaagctaaaagaggtatatacatagaatcaaatgttaacaatgttcctgagttatggaagaagaagtattttatagacaacaaggatggtacatttaaaatttgtgataagattagaaaaagtgtaatttttaagtcatttaatttaatgaatgatttctcatatcaacattttgatttgattttttgtagaaatgttatgatttattttgatttaaaaacaagagaagaacttataaataaattttataatgctaccaaaaaagatagttttttgtttgtaggacatgcagaagtaatcaacagaagtagtactaaatacaaatatgtaaaacctgctatatataaacgataaaaaggtatttttgatatatgattttttggaggcggtaatgtggaacgttttaataatatggttattgctataggcgcatctgtaggtggtacagaagcaatacttgaaattataaaagacctaccaaaatcaacaccagggattgttgtagttcaacatatgccagctatatttacttatatgtatgcacaacggcttgacaagcagtgtattatgaatgtaagagaagctaagaataatgatagagtcgaacaaggaaatgtgttaattgcacctgggggttaccagatgaaattgtgtacggataaacaaggatattatgtaacttgtgaaaaaggagaaagaataagtggtcactgtccatcagtagacgttttgtttgattcagtagcagaagtagcaggtaaaaattcaataggaataatacttacaggtatgggttatgatggagcaaatggacttttaaaaatgaaagaaaatggtttatttacaattggacaggatgaaaattcttgtatagtatatggaatgccaatggtagcttttgatagaggttctgttatgttacaattacctcttggtgaaatttcaaactgtttgataagacatattaatattttaaaacaaaaagattaattttttataaataaaaattaatcttttattaaattatatggataaaaaaccctagaaactccaaatataataagagagatttatatttaggaggaaaatgataatatgaaattttttaaagtcgatacaaaagctaaagttttaagatatgtatttgttttaacattgactataatggctgttttggcaattaaacatgactataaatataataatttaaggaaagatgcttcaattaatttaaatagtaataaggaagcagtgactgttatgagtaaccagtcattaccaaagggtaatacaaatagtaaacaaactttatcagtaagtacaataggaagtaaaacaatagtgaaaaatgatgagtatttagaaagtactataaacatgcctgtaataacaaattcaaataaaattgttgaaaggtctacaaatgataagataaaaaatgacatatttgaattttataataaatcatataaagaagcaaagcagtatcttaaggataatcctgacgagaaaaataagtttgttgcaaatgtagactttgaacttaaaaagaatactgattctgctcttagtataaaagtgagatattatacttatagtggtggagcacatggattttatcaagatatagcatataatgtggatatgagaactggaaaatttttagaattaatggacttatttaaggataatactaaatataaagaagttatagatgaagaaattaaaagacaaatagctgaacttgaaaaaaaggatgaagaaaatatcggaatatataattttaaaggtataaaagagaatcaaaacttttacttgcaagatgagaatctagttgtatattttgatttatatgatataactccatatgcagcgggaataccagaattttcaataaataaagcgttgataagttctatgctaaaaccagagtatgtagatttatttgatttgaaatagaagattaaattaaatgttatgctataatatttagcatagaaacttattaaaattgggggtataaaaatgctacttttaaaaaaagacgacataaaaaaagtatttacaatgagagatgcaattgaagctgataaggaagcttttagaatttattgtgaaggaaagagtgtaaatcctttgagaaccaatatatctgttccaagtcaagatgctagtatgttatttatgccaggatacgtagaagaattaggctgtgggggaataaaaattgtatctgtatttcctaaaaatgctcaaaaaggcaaaccagtaattccagcaacagtactattattagatggagaaactggagaagttagtgcagtattggatggtacttatgtaactcagattcgtactggagcagcctctggagcagctatagatgtattggctaaaaaagattctaagattggagctttgataggtctaggaggacaaggtgagccacaacttgaagccatgatagaagctagaaatttggatgaggtaagagtttttagtagaaacagggaaagtagagaaaaatttgcagaagaaatgaacttaaaattaagtaaatataatactaaaatagttgcagttgaatcatctgatgaagccatagataacgcagatgtgatagttttagctactccatcaaaacaaccagtacttaatggaaacttagtgaaaaaaggagctttaataagtgcagtaggttcatatatgccagatatgcaagagttgtgcccaaactgtttaactagagcgtctaagatattttttgaatcaacagatgcagttttatctgagtcaggagatatattaattccattaaaagaaggtaagataagtaaagatgattttagtggtgatttaggaaacgttataaatggaactattcctggaagagaagatgatgatgagataattgtatttaaaactgttgggataggtgtacaagatgtcgtaacagcaaaaagaatatacgataaagcaaaagaaaacggtattggaatagactggaagtggtaaaatattcaaaataattctatagttagacaaatttatgttataatgttgataaataaattttttattattttaattgagggaggatgtttgtatgaaaatggtaaaaaagttaatattgtctacgattatggctctagttttagttctaactatagggtgttctaatgcagaagaaaaagtaaagtcgaattttgaagctaatttagctgcattagaaatgtataagtatgatgaaaaaggaatttctgatgcattaacagaagctgaatataaacagattcaaacttataacagcaaggacaaggtttcaatgattgctcaattgacacctctttatggtaaagaaaatgctgaaaagatatacgaaacaattgttaaattaattcaaggtgttgaaaagacagtaacagtggaatcttctagtaaggataagataactttgaaagttgtaagtaaagctttagatactagtaaagtaatgagtgaagcgaacactttagtaaaatcttatgtaactgatgaaaagaattacgataaaaaagaaaaagaagttcaagatgatatgacaaaaatgattatagacctttacaataagaaaccaactaaggaagttacaactatgattacatatactaaaaaagatggtaaatggcaaccacctagtaatatacaaaagttatgtgaaggaatatatacaatttaatttattttaaagacacaaaactatcttttaagcatataataaaatgtttggaagatagtttattttattttcaaagtataaattatattttataaatgatttattttataaataatttatcttgataaatagtaaataatttactttactaataataaataatttatcttaccaattaatttactgtattaagtaatttttttattaaataatttgtttactaaataaagtacaattaatagaaattattttattacttgttgaataattaatcaaatttatttgatgtatttggtaatgttgactatataaaactagtaatacaattatggcatatcttgataaaacatggtgaataattgtatcttatatagtcgaaaatatgatatattaatattatacgttaaaagattatttatatttttaaaagtttttttataaaatgaaaggggtgttttttatggtatcaaggcaagaattaaaacgagtatctaaagctcagttatctggaaactggggaatatgtgcaatttctatggcagtatatattgcattgatagtattaatatcaattgtaggattaccttttgaaccattgactactattgtagtggctgtaatagctttttgcgtttcagcaggatttacatgtatgttcttgaaaattactaaagatgaaaaagtcaagataggagatatctttgtaagtgggagaatttatttaagaagttttggtttttatttatttgaatcaattattgtttatatttattcttttataatcacaattataggagcgtttttatcatttggagttttacttactagtggagcaattgaatatttatcaagtgataatgttggaatagggactattatttctactggaataactctagttcttataatacttgttcttatgttaccggtttatatattgctattatatgtttctcaagctactttcttaatttgtgaagacaaggataatatgggtgtatttaaatcaatgggtgctagtttagatatgatgaaaggaaatgtacttaaattatttgtactaaactttagttttataggatggtatatactttcaatagctactcttggaataggtctactatggctaattccatatgtaggtgttactaattgtaatttttatagacaattagtaaaagaaaacccagatgtagaggatatactattagataaagaaaaatcttatactatgtactaagatagatagttatacatttaaataaaatatggctttaattaaacattaaagtataacattgataaaactgtcttttataagaattttttaaaaagacagtttttattattaaaaaataaatgattgacatagtatagactactatgatagttttttattatagtaatgactattgtgataactatatttgaggagcgattttatatggagataaaattatttgattcagaacttaaagtaatggaagttctatgggagagaggagaaagcaaggctggagagttagtaaaaattttaaaagaagaaacaggatggaatagaaacactacgtataccgttataaaaaaattagtgtcaaaaggtgcaatagagagaattgagccaaattttgtttgtaaagctttaataagcaaagaggaagtacaaaaacaggaaacagaaactttaattaataaaatgtttggagggtcttcagaaaaatttctttcagcttttattaataaagaaaatctttcaagtgatgagattacaaaactcaaacaaattgttgaaaaattaaagtgaggtaagatttatgttcattaaattgttagaaatgagttttacttctggagtattacttttaatagttatttttataagagcatgtttatttaaaaaattacctaaaaaggtatttgtattattgtggttgattgttttatttaaacttctaataccagtaagtttaaattctggttttagtatttatagtataattgaatcgacttttgatgtagaattgggtaatacatcaacagaaaattatactcttaagaaagctagtgactctacaggtaaaaacaattctgacgaatttgaaataatgtctaatattgaaaatattatgatgttggaaatgttgggcattttgtcttttatagttactattatgtttagcatacttttatgctttagatattttaaaataattaatctttttaaaacttcaattcatataaaaaatcatgagttcattaaaaaatggatgtgtaagaatagccgttttagaagatttattgtttgcatatctgaatttactaggacaccacttacatctggtattttaaaaccacgaattattttgccaaagcaaatgaattatgctaataatcaaactttagactttgttttaactcatgaaatggttcatattaatagctttgataatctgttaaagttatttatgcttgtagctcttgttgtccattggtttaatcccttagtttgggtgatgttttttttactaaataaagacatagaatttagttgtgatgaaaaggttatgagtatacttggtgaagaatatagggctgattatgcaaccacactaataagtctagcagaggagaataatccattttcaatgacaatatgtagtggatttggaaagacaaaaatagaaaagagaatagttaatattatgaaatttaaaaaatcaacttatgttacttttttagtttcaactgtattagtttgtgggacaggtcttgtttttgcaacagaaaataaagagattaatgaggttgaatcttttggtttaacaaaaaatgaacaaagtgataaaagtggattttcaataagtagtaaatcaactgatttatattctcccaaagtagaatctgatattcttgttagtaaagctaaaagtgatggagagactcattttagtacggcaaaagtatctgtaattgaatttagagagcatgaagaatcatctatgagcaaagtaactaattctgagaatagtgaagaaacgtatgtaaataaatctagtaatagtaaggatgtactttatactgattcaggagaagtttcaattgagcaaagtaactataatgataatcgctttgtcatatcaagaaaagggaatttgttagcagttaataaagaacaatatagaacatggatagagtaaccataaatcttagtaatataaaagatttagaattaaaatactatctcaaaataattaattttgttttgagatagtattttttattgaaaagttttttaaaaagacttgacacaaatatgactactatggtagtctaaagatgtggttgataactattgcaatagtcattttaaactacactacccaaataaatctctaagaaaggaagattggttatgaaaataaaaaaatcccttataagtgcaatgatggtatctgcaatggtactaggaggaactggagcagtatttgcaaatggaaatgattcatctaatattgctttacctaaacttgaatctctaataaaatcaggaataactgaccctactgaattggaaaagtatggtgttgagcattatacttatgaagagtatgctaaacatattcaagaattaaaagactatgctaaagaccctaatgcagtcaaagatgtaagtcaaaaagaccttgaggaaacaattaagaaaatggaacaagaattagaaaagataaaaactgaaggattaaaaattatgaagcctatcactatagaaaatgaagatgggtctcaaatttcaattgcttacaattatgcagcaattgactaatgttaaatataatctctaagatatttcaaaatcctaagtaagtatgattaaatacattaagctactgtaatgatataaacatgcagttgatgattatttaaataattatcaactgcactacccaaataacacttaagcttgttaaaattatgtaataaaagtatcaaagaatttagacaaatgtaattgaacatatggagtgagaataaaataaataagactcaaataagtaataaaaaaataaagtctaagttaaaaataaagtaagaagtagaataaaagtaaatcgagtcaaagtaaaagtattaaaccaaatttataatgttaacattttttaatgtatgttaagaaatgttaacattatttttttttcttaaaaataataattgaaacattctgaaaaatataacgaaaattaaatattatctattagattcattaaaagttaaagaaaattagcattttaggatttttaagatttgtttaaaaaaatcaaaatttattggcatagtaattgcttaatacatagagtaataatatgattataaatttattgattaattttattattatttttaaggggggagagtatttgtagttataaagcatattgggaataatgaaaaaggttaaaaacatattactataaagtatagggggtaggttaaaagagtaatcataaaataaatatacggataatagtagataagaataccagaaaaaaatagatagttaaagggttagggtgaaagagtaatcgtaaaataaatatatagataatggtagataagaatatcagaaaaaatagataattaaagggttagggtgaaagagtaatcgtaaaataaatatatagataatggtagataagaatatcagaaaaaatagataattaaagggttagggtgaaagagtaatcgtaaaataaatatatggatgatggtagataagaatatcagaaaaaaatagataattaaagggttagggtgaaagagtaatcgtaaaataaatatatagataatggtggatagagtagtaagaaaataaatagataaagggatagaataaatttaaatatggaaaatgaatatctaataataagtgattaataaataattgtagatagattgtaaattaaataaatctttaatagaaaggagaactatttatatattaaatagtatttataaatatgaaaaaaggcgattttatatggagtggagttcttatttgtattattgctgtcttagcaataccaagtagtagagaagtatttatggaagcaacaggtgcacatccatatattgggggttttttaaagtttgctgtattagctacaatgggagatttacttggtgctagaattttgtataaggattggaaaataccagtaggagtattttatagagcaatagtttggggaataataggtgtagttaccacatatggaatgtcaatctactcatcaggtgtaggtcaagcacaagtggatggtatgcttccatttgagggaatagcttttgcaaatgctctatttaagagtgcaactatgaatatactaatgtcaccaactgtatttttattccataaggttatggactgttttatagataaaaaatatgaggttggaaaggggattaaggtaaaacttaaagatgtggtaaatattgtggactggaatgcttaccttggttttagtgttttaaaaactataccatttttctggataccatgtcatacaattgtattcttattccctgctgagtatagagtaattgcttctgcatttgcatctatagctttaggtctaatattggctttagctaataagtctaaagttgcagtttaggttcactgatgaagataatagtattatttaaattatgaataactttttaaattaatattatttatatttataataaataataatttagataagaaggaatattctaagtgatagatagtgttttaaataataaggagtaatattctaagtgagaagtagcattttaaataataagtgagattttaaataaaaagtaagcttttcgttagaatagcattttattaaacttaaaaataaatataatattttaaagaaatctaagttgctaagcactgtttttaagaagcttaaaatcccccatttaaagttttaagattctaaaaaaacaagttataactaaaaaatggctgttaagactacaatacttataagtaaaaatacttatggtatatattagttcataacagccatttttattttaaattaataattttattcaataatttgagtttatgttctaaatcaagctttaaattaaaggatttaaagaagctattctagttgtagctacataaactctggatatttcataccatgttttaaaatctactactccgctttgaggtaaaccaaagattccttggaatatcttaacagcgttttctgtatctgctccatagataccatcttctataacttttggtacagctggataagaattagatatagcatttaactgattttgtatggttctaacatactgcccagaagaaccaacttgtagtgtagtaccagggaatgacactggtacaccacttactataggtgctctttcaaatactatctcatctccatagaaatatcttaggatactctcatagtcatatccttggtcacctaagtctttactgccccattgagtcatttggtcaggacattgagatttttgtccatcacaatattgtgctaatagtggctgtcttgatgtaggaggtctttttataaaagtattaaaaatagcatctacaactacgttaattggttcaaataagtttctattatttataaacttatggtcgtatgctgttgttgaagttattgtaaagttatatcctttatttctataccattcagtaaagactctatttaaagtaaatgatattatagctattacatttgcatagattgtctgttcaggccaagttgaatatatttcagatgacgctatgtttttaatgtactctttaaatggaatccaatagtttggagctgatgaatcttctggcaaaccatcatgaactactataaattcaggcactacagggttatctaatacaacgaaaccagtaggaggtggtaatggttttaagttactttctggaatcttaggaggataagtaccatatagagtatgttctcctatgtcaaaaatcaactcactttgtcttgagaaagaacgcttacttcttgttctaggagacatgggaactccttgtcttgctacaattgtagctaacaactgcgttccttctatgacaactgtctcatatccatctgctatggcttccactatatactggctataaggtctaacatcagatggctgtagagagtaatctacatctggtgctggtaatactaaaccagtcacttgaccagattcattacttcttaggttttggtataaagttgatgagctttggctaccattagacattgaatatatgtttactactgcattttgaataggtctattgttagtagcatcaattatgcttactgttaagaaaccatcttgcatcaaatcaccctttctttaaatgaatttagttcccttatatttcaagatatgaatatagcttgaaatttgttaaataatatagatataaatttaaatttttttgagtatttgagtatatttgtatttaaataatttaaaataatttaatgtatattttagtatgtatttaaaacacaaataagctaaaaataagtagatgatataaatcataaataaatcaaaaattttgaaaggaaaataatctatgaagctagatttatttttattagcaatagttcctatattgatagggatgttttggataaggtctaaagatagatattgtagagaacccctaatccatctaattaaattttttttaataggtgcttttctaagtgttataattatacttttagaaaatttactgatgaagtttaatgtatttgaagggtattcagaactaatatatgtatcatttgtagttgcaggacttgtggaagaaggtgtaaaagctctgatactgattcctgccctaattaaagaaaaacactttactgaaaagttagatggtattatttactctgtatttttagctttaggatttgcaacaattgaaaatatggtttatattttttctgaaagtagaaatctagcactgcaagttggtattaatagggcagttatctctataccagctcatgtaatgtttgcaattactatgggctactatatttctaagtataaatttgagggaaataaaaataaaagacgtgagtatttgtttatggcagtgttaattccaattttattacatggagtttttgatttcatattgatgatagaatatagatgggctattatattacttatagtttatgtaataattttgtggaagataaatcttgataaacttgagaaatatatgaatcactctaaaaaagtgtttttcggtaatcttaggaaaaagaagaagaaataaaatttaaaggaaagacataaataattaaagtataataaatgacacacaagtaaagcagattgaagggggattatagatttgacagaattaccaaaggaatttttagaagatattgaagaaatactaaaagatgaatatgatgattttataaaaagttatgaggaaagtaagactactgggcttagaataaatactttaaaaattgacaagaaaaaattatttgatttggagttgtttgatttgaatcaaataccatgggcagaagaaggtttttattatgatgataaaattgacagacctggtagaaatccactgcatgaggctggagcatactatttgcaagagccttctgcaatgagtgtaataccaaaggcagatattaaagagggtgaaaaagttctcgatatgtgtgctgctcctggtggaaaatctacatatatactatctaagctaaacgatacaggtttattggtttctaatgaaattaatgctagtagaattaaggctctaggggaaaatttagagcgatttggagcgagaaattgtattataacaaacaccgattctaatagcttaagaaagacgtttaatgggtattttgataaggttattatagatgcaccttgttctgggcaaggtatgtttaggaaggatgaggttgccatatcagattggagttatgcaaaggtagtagaatgtcaatccatccaaaaagagattatcagagatggatataaaatgttaaagaaggatggcattttaatttactcaacttgtactttttcaagggaggaaaatgagcatgttataaatgagtttatcagtgaatatccacatgcagaacttattgaaatggaaagattatggcctcataagataaagggagaaggtcattttgttgccaaaataaaaaaattagaagaagaagaatgtaatgtcaaagaattaaaaataaaaaatttagataaagaaataaaggattatagggagtttgaaaagaaatttttaaaggttgatttttatagtaataaaaaaaataaattttatttaagaggagaaaatttgtacctacttcctgaaatatatccagatacgaaaaaactaaaagtattgagatacggtttgcatttaggggttttaaagaagaatagatttgagccttctcatgcactatctcattacttaaaagttgaagatgtaaaaaatgttgaaaacttcagtgtacagagtgaatcaattcttaaatatttaaaaggggatgttgtgaattctaatgatagtagaggatgggttttggtttcggttgaaggaatacctttaggttggggaaaagaatcttctggtgtaattaagaatcattatcctaaaggtcttagaaaagtattttaaactattagaaaaaagaagtataatatttatattgtaggtttatggtagattattttgctgtagattgacttaatatttaacacagaggagacgattttagtgggtgaagcagttaaaaaagaagttgtagaatggataaaagtgattgtcatagctcttgttttggcatttgcaataactcgttttatagtgccaacaatagtcaaaggagaatcaatgtatcctacattagttgaacgtgattatttgatagttaacagaattgcgtacaaggtaggagagccaaaatacaaagatataatagtatttaaaaccgacttaacagaggaaaatggaaagaaaaaagatttagtaaaaagagttatcggggttcctggtgaccatgtaaaaatacaagactccaaggtatatgtaaatgataagttgttagatgagacttcctatatacataataatcgtactgatggagatattgatatcgtagttccagaaggaaaattatttgcaatgggagataatagagaaaaaagtttagatagtagatacgatgaggttggattggtcgacgagcataccattttaggaaaggttctagtcagattgtatccattttctaagataggaactattgactaaacatataaaatttggagcaatcgctgattagctgaaatcaccagaccatacacaatagttgtctatataaaaaagacaacaccttatttagtagacttatctaaaagatagtgtttaagagacattatcaataaagataatataactataaaggagaatttgtgaatgaatgaaactattaaagaagagattgtagagtggataaaaataattattactgcacttttttttgcatttattataactcgttttataaaaccaacactagtaaatggagaatcaatgtacccgacacttaaatcacatgattatttggtagcaaataggatgacatataagttatcagaaccaaaatgtggagatataatgatatttaagactgatttattacaagagaatggaaggaaaaaagagcttgtaaaaagggttataggtgttcctggtgaccatctaaaaattaaggattctaaggtttatataaatggtaagttattaaatgaagtttcatatatacatgataattatactgaaggcgatattgatatggtgattcctaagggaaaagtatttgcgatgggagacaatagagaagttagtttagacagtagatataaagaagtgggattggtagatgaagaaaatattaaaggaaaagttattttaagagtatttccttttacagatataggtatttttgagtaggtgatttgtatggcagttggtatagcgtccttattgtttaatattgaggaggctttaaacatttgtgagagtataaagcaaataactcatttagagattggaattgacaatatatctgaatgtagcgagttatgtaaatataaagagagaatttctaagttaggattatctatagggatacacttgcctatggaattaaatacttgcgaaaacatagagtatatacgaaattcatggataaattttattgagaagatagaatttgaactaaaaggatttgatataaggtattttaaccttcatttgggatatgttatgacaaatagagttagaaagaatagagacaaatatttaggaaatagtgtggattttttagataaattaaatacaaattcatatgtatgtatagagaatacttattcaaaaggtggggatttttcaaatattggaaatatatcttatgattttgaatatatatttaagaggattaaaaattctaagatttgtttttgttacgatactggacactgtttaattgatgaggatgcttatgtaaagaacttaaaggataaaataagactgatacacttaagtgataatgatggtatcaatgatacacatgttggtataggaagaggaattttatctgaagaggggattaaagaggtcttaacattagatgcagaatatttagtattagaaataaattacgaagacattgaagatactataagtaaattgaataatattgtaagagagggttaaatacctctctttatcttgttgatatgcctcattaactaaaatttatattcatcaaaaggaaggagatgttgaagtgaaaaaaataaacttaaaaatagaaggaaaagataaggaatattcattagaagaaaattcccctggaatcagattgggagatatagcgaaagaattttgtgatgagcataagggttatataacacttgcagttgtagacaataaactaaaagagctaaattgtagagttaagaaggattgtgagataaattttttagacactactaatgaagatggagagagagtttactttagagtcatgtcatttatatttgtaatggcttgtagagaaatcttttgggatagcagagttacaatagaacattcactatcagatgggctatattgtgaagttcatatagatagaaagcttaaagaagcagatgttgaaaatataaaaaacaagatgaaagagatagtaaacaacgattatgttatagaaaaaattgaagttacaagaaatgaagctatttctatatttgaaaataatgaaatgtatgaaaaggcagagcttttgaaatacaaagagtatgatagtgctaaagtatataagtgtagaaactatatagaccatttttatggttatatgttgccatcaactggttatataaaatcatttgatattaagctttataatggaggcgttataattttagggcctagtgaagaagataagactcttcctatgaagtttgtacctcaacctaagctatcaagtgtatattatgaagcagaagaatggtcaagacttatgggaattgacaaggtagtatctcttaacaaaataatagaaaacaatgaatatggagatataataaggacattcgaagcattgcatgaaaagaagttatcccaaatagcggatatgataaaggatggcaataagagagtaattttaatagcagctccatcttcatctggaaaaacaagttttgctcacagattatcaatacatcttagagtaaataatttaaatcctatttcaatttctttagatgattattttatagatagaaaacatactcctttagatgaatatggaaattatgattttgaatcaatttatgcaatagatttagagaagtttaacttagacttaaagaaacttttagctggtgaagaaattgatgatataagattcaattttaaagaaggtaagagagaatacactggtaaaaaaataaagatagattcaaatcagccaattatattagaaggtatacatgggctaaatcctattttaacatcatctataccagatgaagataaatttaagatatacataagtgcccttactcaaataaatttggatgaccataatcgaatccctactgctgatttgagaatgataagaagaattgttagagactataattttagaggatatagtgctgataatactattttacaatgggcatcagttagaagaggagaaaagaagaatatattcccgtaccaagaggaggcagatgctatatttaactctgcttgtgtatatgaattagcagttttaaaacgatttgcgaaacctttgttggaagagataaaggaagataatcctgcacatattgaagctactagattactaaagtttttgcagtattttgttgaattggacgatacttctgacataccaggtatttcaattcttagggaatttattggaggaagtaaaatagttgattaatatgtgtattatagattgttttatgaagattaaatggcatagcaagtagtgtgattggtttatgttaagtatattaagtgtaaagtggagaattaaattgatacagattttaaagtttgagttgatatataaaaaggcttgttttatacttttgtatgaagcaagctttttattttaaattttacttttttgtttaatattttgttagtttatgtgataattttttaaaagagtaaaagagtaaaagagtaaaagagtaaaagagtaaaagagtaaaagagtaaaagagtaaaagagtaaaagagtaaaagagtaaaagagtaaaagagtaaaagagtaaaagagtaaaagagtaaaagagtaaaagagtaaaagagtaaaagagtaaaagatgttaggttagaaatttttgacgttataagaatttaaattactggattattagattactaaattactagattattaaattattaagctatttaaactgtttaaattgtttgaaaaatgaattgattcttgtagaaaatagttttaaagtataattttttttaacactgttttattatagtacaaacttgtgctaaaatagaatatataacataatataagaggtgcatatgaatacgttagatgagacattattaaaagaaattataagttctaataagaagtatactaattatgggcaagtcgctagttacataccagaattaaaaaacgctagaagaaatgatttaggaatttgtatcatagatagcgaaaataatctttatagtgctggaaactgtagcacaaagtttactatacaaagtatttcaaaaccaattgtgcttgctatggcacttatggataatgattgggaagacgttttttcaaacgttggaatggagccaagtggggacccatttaattcaataatgaaacttgaaattaatgacacaaaaaaaccctgtaatccaatgataaatgcaggggctatagtaactacttcccttataaatgggagttgtttagaagaaaaagaagaaagaatgcttagtttctttagaaagttagcaaaaaatgataatataggaataaactatgatgtctataagtctgaaaaaatgactggagatagaaacagagctatggcttacttattgaaaagtgatggatttatcagagggaatgtagaagatgttctagacctttattttaaacaatgctcaattgagatagattctgtagatttagcgagaattggaataaatcttgcaaattatggagtagatatagaaaatggtgagcatttaatgagtgaaatggtttctaggattgtcaagacatttatgatgacttgtggaatgtatgatgcttctggggaatttgctattaaagttggcattcctgcaaaatctggagttgggggtggtataatggcttctgtgccgggacgcatggggattggtgtttatggacctgcgcttgacaaaaaaggtaacagcgtcgcaggagttaaagttttagaggagttgtcaaataaactcaaattaaatattttttaaaatattaagaaaggatttttttgacaacaacatataatttaatatataattaaattgtaaagaaatatgaattaaataaattttttaggaggggtcaatgaaagaggtattggtattacgagatttggagtgcataaaggctattgcgcatccacgtagaatagatattctaaaagcatttgacaaatcgccattgtcagcaaaacaattatctcaattattggaagaacctcatgcaaaaataaactaccatataaaaatgttatacaaagttggtattttagaattagttgaggaaaaaataaagtcggggattgtggaaaagtactattatccaagtgcaaaaaatgtggttatagggaataggatacttaatttttctttagacaatggggaagaaaaagaagaattgtacatatcaaaatttgaaaatatgagtgaagttttttataaggcagcagaggaagatgttttagaaaatgaaaatatagttgattatcatgatatttctcttactcatgatgaattagttgaacttagtgacactatgaagtcaaagatagatgaaattttaaataaaagacaacacaatgttgaaggttctaagtatgatatagctatggttatagttcctactcttgaggaggaatgtcctagttagagaattaattatggattaattaaagatataatattagagattgaacatcaaaatttacttaataatcaaaaaatagtttttggtatgggtaaaacaatgatttttaatctctatttttttgttttcttatacctattgtatttgtaaataatatgtatagtgtaagatgtatacactatctgagaagtgcttagataatatacaaagtatgtaagattataatatttgaaattgattaaaatgggtataattaaagtgtaaatattaaaattaaaaattaatataaattaaatcaatgctagaaatatgttaaaagaggaatgagattagttgggatagaacatcccttagagcttatgaatttttagtgaaaaagtactatcaaataggaatctccatcttcatatgttggctaaatatagttaaggtggagtagttcaaaattaaaattgagtacaagtcgtagtacaaataaaaggagattaatatgattaaattaggaacacatctttcaatagcaaaaggatttgctaatgcggctgagacagctgtatatattggtgcaaatacatttcaattttttagtagaaatccaagaggaggaaatgctaaagaatttgatgaaaaagatataattaaatttcaagaaattagaaaagaaaataattttgcaccactgcttgcacatgcaccatatactatgaatctgggtggtacaaaggatgatgtatacgaatttgcaacaagggtgatagatgaggatataagaaggatggactcattaggaattgaatacatgtgttttcatcctggaagtcatataggtggtggtgtagattttggtatagatagaatagtaaaaggattgaacaatgccataaagggtgatgaaaatataactatacttcttgaaactatgtcgggaaagggaactgaaataggttttaaatttgagcaattaaaaagtataatagacaaaattgagcataaagaaaaaataggtgtgtgtcttgatacatgtcatattttttcagccggttatgatatagtgaatgatttagatggggttttggaagaatttgataaggttataggcatagaaagattgaaaactgtccatctaaatgatagtatgatgccatttggagacaaaaaagacagacatgctcctataggggaaggaaagataggattaaaagcattaattgattttatggaacatcctagtctaaaacatttaccatttttcttagaaactccttttgatgatgaaggtcacaagagagagcttaaaatgataaaagaaatactatctagtaaataaacctttattaaaaatatgtgaaatactccgccctcaacataattaaggtggagatacaatcatgaaatgtgataatttaaattaatggataggaataacaaaaattgtatacaaattaactgggtataaagtatgattatattatgaatagtatgtaaatatattgcaaagattctcataatttgttgtataattaaaggtaacatatttatattatataaaaaattattaaaagttaggtggggaaagatatgagaaatttaggcaatactaacatgaaaataaagagagttggctttgggggcattccaatacaaagaattactcaagatgatactaacttagttataaatgagttagaaaaacaaggaataaactttattgacagtgcaagagggtatacaataagtgaggaagcaatcggaattgccattgaaggaaaaagaaataaatttttcttagctactaaaagtatgtccagagattatgattcaatgaagagagatgttgaaataagtttaaataattttaaaactgattttatagatttatatcaattccataatgttaaagaagaggagtatgataatctttttaaagataaaatggcttatagtgcccttttagaggcaaaggagcaaggtaagataaaacatattggtataactagtcacaatttaaatactatagaaaaagctatagaagatggaaaatttgacactatacaattcccttacaatatagttgaaggacaagcagatgaagtgtttaaaaaagctcatgaaaaaggaattgggataatagtaatgaaacctttagctggaggtgctttagacaatgcaacactggctattaaatatatactatctaaagattacatagatgtagttataccaggtatggagagtgttgaacaggttagacaaaatgtcgctgtacttgaaaatcttgttctagatgaaaaagataataaggaaattgaagaaataagaaattctttaggtaaaaaattctgtagaagatgtgaatattgtatgccttgtgctgtaggaataaatataccattgagttttttatgtgaaggttattatactagatatggattaaaagagtgggctaaagaaaaatatgaggttatggatgttaaacctactgagtgtattgactgtgggctttgcgagagtagatgtccatatgaacttcctataagagaaatgcttaagactgttgttgaaaagctaggatagattttatttattgaaatcggtgtattaaatttactccgatttctttttattagatgtggtcttatatacaaatattaaatttacatagttatagctattatataaatttaatatttgtttaatacttattaaatatttgcttaatgctttttaaaaacatttgtttgagtatagacataacacaattattattgttgtattagtatagtttcaaatactggagtatcaatataatgtcgaataacacataaaatctttatttttcaaaaatattataggatatatcgtatttagatactggataaagttcaatttcaaccctagggttatctttatctataaaatcaaataaaaatactggcttaagttgtttatcattttttattattccacttttttcaataccatcacaaatactttttggataattatgtaaatcccccattctcttatttggaaagaataatttcaagactgttattagattttcttcaacagtttccccttgatactgttggtttataaaacctgcaatcatgttttcgtatgcaagatacttagaatattttccctttgaaggcatccatgcttgaccatttatgttatgaagcttaaaattagatttactaataggtctacctggaattgttattttaatcaaatttttcaccatccttatacagtatttattataatctgtatatgatttaaaagcaaattgttatttaaagtgtttttacagggcttgtttgtaaaattttccactttagatgtagtaatataagataagtattttgcttacaaattttaaaatttgatatatgatggacatattcatattagactattataagaccttcataatattaataagtataggtttagtaaagagagtaaaaagaaatccatataagccaagtaaagacttaataaatggcaatgtaaatgggatattaattataagaaaaaatcaatctttttgcattaactataggaagaatgtcaaaatataactaatgatatttgaagttttagagtttatattaaaaggtaagaaggttaagtgggtaaaaaaggttgaatagattaaaaaggctaagtatctaaaagagttaagtaggtaaaaaagttaaataagtaaatgaaaaaagctaagtatctaaatgagttagtagataaaaaaattaaatagataaaaagattaagtatctaaaagcgttagtagataaaaaaattaaatagataaaaagattaagtatctaaaagcgttagtagataaaaaaattaaataaataaaaaagactaagtattcaaaagagttagtaggtaaaataattaaatagataaaaagactaagtatttaaaggagttaagcagataaaaaagttaaataagtaaatgaaaaagacgaagtatctaaaagagttagtaaataaaaaagttaaataagtaaataaaaaagatgaagtatctaaaagagttagtaggtaaaaaactaaataggtaaaaagacgaagtatctaaaagagttagtaggtaaaaaagttaaataaataaaaaagacgaagtatttaaaagagttagtagctagaaaaggttaaaaagactaaaaaaattaaataaatttaaaaagtcaattagattaaaaaggaataattttatggataataaggaattaaaagcattttgtaatttaataggattaaactgtgtaggagtagcaggggtagataagtatgataatttagaaaagatacttaaggacagacaacaaaaaggttatttaactggtatggaagaaccaataattgagaacagaattaacccaagacatataatgaaggatgctaactctataatagtctgtgcatttccatatcatataaatagacaagaaaagaataaaaattcaaatttatcaaaatattgtcatggaaaggattatcacattgtagtaaaggactttttacaacaaatttgtgattatatttctaaaacagtaacagattttaaatacaagttatttgttgataatggaccattagttgacaggtatttagcttatttatcaggaataggatattttggaataaataataatatcataactgatgaatatggttcttacgtatttatagggtatatagtaaataattataaatttgaagaagataaaccactagaaaaaagttgttttaaatgtggtaagtgtgtaaaatattgtccgggaaatgctatattgggaaattatgatatgaaccccaaaaaatgtttatcatatataactcaaaaaaaaggagatttgtcagagaaagaaaaagttgttttaaagaatggcaaaaaggtatttggatgcgatatttgtcaagaagtatgtccacataatgttgaaatgccaacaactcatattttggaatttaaagaaaatataatagattatttggattatgatgagatacaaaatatttcaaataaagaatttaaaaggagatatggagatagagcttttagctggagagggagaaatataataaagagaaatatggaaataattttagataagtatgatgactaataataagagtctgtttcatatactttaatgtgtatttactttaacacttgttgtgtaaaagtcatattatatcattaaagttaaatatggggaggtgggggaatattgaaatataataatacatctgaaataaatccactagattatatattgggtcaagaaagagctgtagaagctatggaattagggttgaaaataaataatccagcgtacaacatatatatagctggtgaacctggaactggtaaaagtacttatgccttaaaggttttaaatgaatatgcatccaaaaaaaatacacataaagattggtgttatatatataattttgaaaaccctagagagcctattatagttgaattagaaaaggggtttggaagagaacttaagaaagatatggagaaattaattgaaagtcttttagaagattttaaaaatgcgtttgaaagtgaaaattttgaaatagaaaaaaatagacttctagatgaatatgaaatagaaaaagatatgcttttgaagcaaattaagaaatatggggaagaaaaaggatttaaattaaaacagagtaaaatgggaatagtttttatccctttgaaagaagaggaagatgaaagtgataagtctgatgaagagttttacaaagctaaaagagaactagaaaatatggcgatacaggtcgtatataaaattagaaacttagaagaaatagctgaaaaagcagtgttagagcttgaagaagagatagctaaacttgtagtagaacctcatatcaagagattgtgtgaaaaatatgaaaattatgataagattcaaacttatctggaaaatataaagaaagatataatagaatatatgtatttgttctatttagatgaagaggagttaaaagataagtatgataaagagcattttattaaatacaaaattaacctatttgtagacaatgaaagctcaaagaataaagaatcagcacctgttgtagtagagataaacccaagtccagcaaatctatttggaaaggcagagtatgattatgcaaatggaaatataaagactgatttcacaaaactattatcaggagcatttcatagggctaatggtggttatttagtactttatgcagaccaattactaaaatatacaatgtcttgggaaattcttaaaaagactttgcagactaaaaaagtaatattggaaacacaaacagcaattaaaccagaaaatatgccattggatgttaaattagtactgattggaagccactatatatatgatattttatatagatatgatgaagattttgaaaaatattttaaagtatttgtagactttgatagtgaaatggataaaaatgaagataatgaagaaggaatagcaagatttatagcataccaatgtgataagaataatttaaggcattttactaaatcagcagttgaagaggttattaaatttagcactagattatctggtgatttagaaaaactatcaactaagtttaataaaataatggaagttgtaatagaaggaagtgcttatgcagagtttagaaattcggagtatacagagcagtgtgatgttaaaaaagcaataagtgaaaagagaaaaagaatcaatagagtggaaacacatatggatgaatcaattgaaaatggatttactctaatagaaacagagggaagaaaagtaggagtgataaatggtctgtcagtcttaagtacaggagaatactcttttggtagagcttcaaggattacagcgaccactagcccaggaagtaaaggcatagtaaatatagaaagagaagtaaatatgagtggctctatacataacaaaggagtgcttatattaggtggctatctttctgagaattttgcacaggatttactattgtcactaaacgcatatgtttgttttgaacaaaattatggtggaatagatggagatagtgcatcttctgcagaattatatgtactattatcatctcttagtggagtatcaattaaacaaaatattgctgttacaggttctataaatcaaaagggtgatatacaagtagttggtggtataagtgaaaagatagaaggattttattctatatgtaaaactaaagggttaaatggtgagcaaggcgtcataattcctagaaaaaatcaaagaaatctcgttttatcagatgaagttaatgatgcagtgcgagatggaaaatttaagatatatactgttgaaagagtagaagaggctatagagatattgacagatgttaaatttgaagaaataaagaaattggtaaaagaaaaattaatatctttcagcaagatacaaactgtgtcaaaagaataagtttattatagaatttaatgggtatttatgtataataaaaagcaagaactttaataggtttttgctttttttgtaaatatatataaattaaattcttattttgtatgttttatatattgatgtttattttttgttgatatgactaaactatttataaatagtgttttataaattggtattttaaagggggataattatgaaaaatgtaaatctaaaagagataaatgaaaaagatgtaattgtggaagaagatataaatctaaaaggaatggataagaaagatgtaattgagaaggaagaagtaaataaaaaaagtatagataagaaagatataattgagaaagaagagatagataaaaaaaatgtaaagaaggttgaggttcaaaaagaaatagataaaatgattagtaaaaaagatgagataattgatgagaaagatatagagaattttaggtatattgaagaagataaaaaaagtatcaaagtaagtaaaaaaagtactaaaaaaggtgaaacggagaaaaaaacaaagaaaagtagttctaataaggctacacaaaaacaaagcaaagaagttaaaagtaagtctaaaattaaaagtgaatcagccaataaaaaagatgtaaataagattttagatgagttggaaaaattgtacccagatgctaaatgtgagttaaattatgggacagcctttgaacttttaatagcaactattttatcagcacaatgtactgatgtaagagtgaataaagttacttcagagttgtttaaaaagtacaacacagctagagactttgctaatttgagcattgaagaaattagtaaagagataaagagttgtggtctttacaaaagcaagtctcaaaaaataaaggatacatctgaacagctatgtgaattatatgatggtgaagtacctgatagcttagaaaagcttataaaattacctggtgttggaagaaaaacggcaggggttgtacttagtaacgcttttaatcatccagcaatagctgtagatactcatgtatttagagttagcaatagaataggaatagtggacgagccaaatcctcaaaaaacagaatttgcacttatggaagctataccaaaagaaagatggtcacactcacatcatgtattaatttttcatggaagaagaatgtgtaaagctagaaatccagaatgtgcaagttgcccaataaaagaagattgtaattattataaagaacttaatgaaacgaaataacttttagaaagtaagttgtacaagagggattttctgatataataatacttgtgaaaatgttagataaaaaactattatatacatgaaataaaaattattattaacattattttatataatagtataatattattgttattctgtttataaaataaaatttgataaataaaagcgatacttagggaggattaaaatgtcattaaatatagtattagtagaaccagaaatacctcaaaatacaggaaatataataagaacctgtgcagcaacaggttcaactttacatttagtaaaaccactgggtttttcattggatgataaacacctaaaaagatgtgggcttgactattgggatatagctgatatacaatattacgatagctttgaagaattacaagaaaagtatccaaatagtaaatactttttttctacaacaaaggctaaacagtcacattcagatgtgaaatatgaagaaaattgttttatagtatttgggaaagaaacaaagggattaccagaacctttgttgaaagcaaatatggatacttgtattagagtgcctatgttggatgttgaaaaggctaggtcattaaatttatcaaattcagttgctattgtagtgtacgaggctttaagacaaataggatacccaaatatgaggtagtttcaacaagcctaaatgagaaaggagcatacttaatgaaaaatctaaagataatctgtgacagtttatcggacgtgccaaaagatttgttagataaatatgatatagatatagtttcattaacagttatactggaggaaagagaatacaaggatagaattgatatatctggagatgaattttataaaaggcttagagaagaaaatgtatatccaaaaacttctcaagctacttatgcccaatttaaggaaatttttgagaaatatacaaatgaggatagagagatactttatatagcagggtctgccacagctacagggacgtatcaaagtgctgtaatggcaaagaatgatgtggatggtaaaatatatacatatgactctaacttgctttgtatgggaactggtttacttgtaataaaagcaggagaacttgcaagtgaaggaaagtctgttgatgaaatattacctgttttggatgaattaaaagagaaggcttttgttatattttcagtagatacattggaatatttacaaaagggaggtagaatatcatctactaaggcagcaataggaagtatattaaatataaaaccgattcttgaaataagagatggactagtttcgcaaatatctcaagtaagaggaaagaagaatgtaatttctaagatgatggaattgataaaatcaaattgtggggatgatttatcagaccaaattgtgtatataggatatagtgatgattttaaggaaaaagaacaattatctaaggttatgcaagatgaattaagacctaaagaaattagatttttccaaattggtgtgtgtataggtgcgcatgctggtcctggtgtcactggtatcatatgcttaaaaaataaataatatatttttggatgacattatttatttttttattaaattaggatagaatattaattattgagatgttaaattggatttattttggatgaaattaagtgttgatatattagatttagtttgtagggaagtgtgtaaatagataagaatctattgcacacttttttatagtaagatttattaaaaaaatttcaaaatgtacttgtaaattgtatataaaaaaattataaataggatgtaaaagtaaataggatgtaaaagtaaataggatgtaaaagtaaataggatgtaaaagtaaataggatgtaaaagtaaataggatgtaaaagtaaataggatgtaaaagtaaataggatgtaaaaatatcgtaaatgtatgaggagtgaaatttaatgcgtttcaaaagaatattgatattgatgttaactgtagcaatgatagctggaatgttggttgggtgtgctaataacccaagcaataatcctagctctagcaaagataataaaagtgatataagcgataaaagtaattcaaaaaaatctgtatcaatgatactagatattgaaggaacaaataatgaagctatgaataatgcagctttattagcattaaacaatgctcaaaagaaacttaatatagatacaaacaaagtggaatcagatgattcctcaactttttctaatagtatagatattttatgtaatgacaattacgatttaattatagctgtaggagctagatttgcaaaaccattggagatggtagccaagaaatatccaaagcaacaatttgcaattatagactatgagtatgacaagcaaccttctaatataacttcaatttcttatgaagataataaatctggatacctagctggattaattgctggaaaaatgactgaaagcgataaggttggttttataggaggaataaagagttctagtagggataaatttgaatcaggttttagagagggtgttaaattttctaatagtagtataaaggatatttcagttgagtatgcagatgtttttaaagatagcaaatcagtagaatctatagctaaaaaaatgatggataatggagtggatattattttttctactactgaagatgattcaaaagctgtaatagatgcagtaagggcaaaaaataaaaaagttatagcaacgaataaagaccaacatgagttagctccagaaaatgttataagttctattgtaaaagattttgagaatcctacttataatctgatacaaagttttgtaaaaggaaattataaaggcggaaaagttatagaaaacacagttaagtctggaagtactgggcttgcccaaaatagttctcaaaatattcctccagatgtgttagaatatgttaataagaacaataaataatctactataatatccaagaatacttatgactttagttatgaggtgaattggatgttataatagacatatatagaaagacgtatgcagaggtaggcagacctatctaaatcagggagtgaattttgtgaaaataaaaaggatattgatggcttgctttgtagtagtttttacaatttttatattagctatatgtaactttgattttggatttgataaagtaaataagaataattctaatatagatagtgctaaatcgaaacagagtgagtctaaaagtgtaccaacttcagcagaaaaggataaattaaatagtaaaagtaagaatgaagaagatgacacagaagatgattcatatgtaagaaaaactattggagtattgttagataccgaaaacttaaataacgaatcatataataataatgtactatcagccttaaaaagggctgatgaagattttgatgttaggataaaacttgaaaaaccaaagacttctaaaagttttaaagagagtatagaaaaactacataagtatgaaccagatttgataatagcagttggagctagatttgcagagccaattaaagaagctgctactaaatatcccaaacagcaatttgcaatagttgactatacttataaagttcagccagctaatgtaatttctgtatcatttcaagataatgttactggatatttagcagggcttattgcaggtaaaatgactgatactgggaaagtcggttttataggcggagttgagggttctagtagagataagtatgaatctggatttagaaaggggcttaaaacttcaaataaagatgctgagttactagttaagtattcaaatatatttgaaaaccctgaatcagctagaactattgcaaaggaaatgagagattctgatagagatgttgtattttcagctacagaagatgatagtaaaagagctattcaggtagcaagagaaaatggtggtaaagttatagctattaataaagaccaatacgatatggctccagataatgtaataagttcaattataaaagatgtagaacaacctgtctatgaactgataaagaacgttgcaaaagatggttttaagggaagtaaagtaatggaatttaaaataaaagatggagaacttggcttgacttcaaagagcagtagaaatataccaccagatgttttggaatacataaaaaaagagtataacaaagtgaaagatacatattaattattgatgtagaagattataaaaatatactgtttaagtttagattagcaataaaaagatatatttattaaatttgtgctaactgtacaaaatatattgattaagtttagattggtgataaaaagatatatttattaaatttagtctaactgtacaaaatatattgattgagtttagattagcaataaaaagatatatttattaaatttgtgctaactgtacggaatatactgcttaagtttagattagtgataaaaagatatatttattaaatttgaaccaactgtacaaagctatactaattaagcttagattaactatataaaattataacaataagtgtgtgggcagaaaaattctgctacacactttatttatattcatataaaaaaattatcaaaaaaaagaaaaaggagtaaaaaatggaatttacaagagaaccatttatactagatgacgatttgtgtctagctttggtggacaaaagaattagttatctaatggaaaatgaattaaaattaagaaatatagagataataaaaacaatagaatgtaaagaattatatgaaagcataaaatatcacccggatatatgtatttgtaatttaggaaaaggagatataattgttgcgccgaatgtatataatcaatacaaagagttattaagtagatataaatttaatataattaagggagaagctaatttattaaatagatacccttatgatataccttacaatattgcgatagttggtgactatgctatacacaattttaagtatactgacaaagcaatattagattatattgaaaataataaacttaaaaagataaatatagagcagggctattctaaatgctcaatctgtatagtagatagaacgtctataataacatcagataaaggtatttggaaaagtatgaagaatacagaaatagagtgtttattgatagaaaaaggtcacataaatttatttgagatgaattatggatttataggtggatgtacagggttgatttctaaggataaactagctttttgtggagatgttaaaaaacatcctgactatgaacgtataaaaagttttgtagaaagtaaaaacaaggagatagttacacttagctgtgaaaatttactagatataggttctatagttcctctcatgacaagaaaggagcgataactttggttgagaaggataatatttcttccatgaaatttttgaggaataataatgtaaacgatagattaatatatacgaatgacattgtagaagtagtgatagattctgcaaagcaagaagtgttaaataaaaaaatacttaatggtactaaagctgaacaaagagctttaaatattgatgagatatcaacggaaataactagtatgataataagtataatgaaagagaaacttttgaaagaatacattctaaaatgctatgggcgtacatatcctgaagataaaaataatatatacatatattcactgaacatatttgctaaaaaagagatttttatgagagaaacagtatttactagggtgagaaattatatagaagaaaatgattttataaatgtagaaggttttattagatttagaatgagagaatttatgaaatatatttctgctataggtgatattgcagttgaggagtatttaataaagaaagaccaagatgaatttataagagttttaaaatactttatagatactcaagaagaaaagattgatttgcttaaagttcatataatggaagataatacatttgttttatacgataaaaatggaaataagatagacagtatagatgatgaagaaattataaatatggtaataagagaaaatttaaattatgaggactttttaataagtaccttattaactctatgtcccaaaaaaatagaaatattggatttgttaaataataattgctcaaaggaaattatagatactgtagaagcaatttttgaaaataaagttagtataattatggaaaactagaatctaagcatataaaagctagccatataaaattaaaaaaattctttttaaatcgacacaaaagacttataattgtatataaagctatagtataactagagttattaagtataaagaatatctacttgattaatgcaatatagctggcaaatatacaattgataaggagtaattttataatggataatttaattaggatactgatattagctgttattggtggatttataggttatgttacgaatgtagttgctataagactgatatttagaccaatagagcctattaaaatacctattttaaatatagaaatagtaggtcttataccaaagagaagagcagaaatagcagcaaatgtaggagaaataattcaagaagaatttctttctatggacgaaatacttgcaaatatcattactgacgaagataaggaagaagttgtaagatacataaaagcaagggtaaaaattataatacatgagaaagtttcatttatcccgagtggtataaaaaacatgatacaagattatctaggagagataattgagtctgaagttaagcaaagtatagatgaattgagtaaaaatataataaataaagcaaatgaacgtatagatatacaaaaaatggtcgaagataagattaatgaactagatttatatgaattggaagagataataataagaatagctaagaaagaattaaaacatatagagtttttggggcttgtcttagggtttttaataggtatagctcaagggttaattactatgtttatttaaatatatgagaagtagcatttatttaagtactaattatatttacctatttgagtgaattacttattaatagtatttagatattaattgtatttacctatttgagtgaattacttattaatagtatttagatattaattgtatttacctatttgagtgaattacttattaatagcatttagatattaattgtatttatttatttgattgtgttacttattaatagtatttaagtatttactgtactacttattaactatattaagtattgattgtatttaagtatacaaaacctaaaaagagtacaaaaattagaagttagttttaataaaaattagttttagtatttatctagtcatatctatcatgcatgtggatacgttttaaaaattttaaatttatgaaaatattataatatcactataaatcaagagattaatttaatataaaaatataagaatattggtttacagctgattgagatgaaaaataatgggtaattaatatattacattaatgttgattgatgtataactatctgttataatgaaaatatattaaaaatcatagtgttgaagaggaagagtagagtagaaaccattctcagagaatttgggtctatggctgagagcccatgtaataggtctatttgaaaactaccttggagctgagcttattagcagtatttgtatttgtactatacgtgaaagtgctcgggtgacgaccttatagtcatcaagagggttgtatatacttgtatacgccaacttgggtggaaccgcgaattaatatcgtcccaaacatatttggggcgattttttattacaaaaaatctaaaaattatttcaataaggaggaaaaaacaatgattaaagttgctttaaaagatggctcaataaaagaatttgaaaatgctatttctgttatggatgtagctaaatccattagtgaaggattagctagaaatgtggtagcagcgtctgtgaacggagaggttgtaggtctggaccacattatagatactgattgtgacttgaatttatttaagtttgaagataaagaaggtaaggaagtttttagacatacatcagcacatatattagctcaagctataaaaagactttacccagaagcaaagcttgctataggaccaagtatagaaaatggattctactatgatatagatttagaccatagattagttccagaggacctagagaaaatagaagctgaaatgaaaaaaatagctaaagaagatttaaaaatagaaagatttgaacttcctagaaatgaagctttagagcttatgaaagaacaaggagaagactataaggtagaacttatatctgatttacctgaaagtgaaataatatctttctacaagcaaggtgattttactgatttatgtagaggaccacatttaccatctactaaaaaggtaaaagctgttaaattacaaagtgtagcaggtgcatattggcgtggtgacgaaaataataagatgcttcaaagaatatatggaacttcttttgagaaaaacaaagacttagaagagtacttacatttactagaagaagctaaaaagagagaccacagaaaattaggtaaagaattaggattatttatgatacctgaagaaggtccaggattccctatgtttttaccaaaaggtatggaacttaaaaatgaattattaaaattctggagagaaatacacagaaaagctggatatattgagatagaatctccaatcatattaaatagaaaattatgggagacttcaggacactggtatcattacaaagaaaatatgtatacagttaaaatagatgatgaggattatgctataaaacctatgaactgtcctggtggattaatttactataactctcaactacattcatatagagatttcccaatgagagttgcagagcttggtagagttcatagacatgagttatctggtgcattacaaggattaatgagagttagagcatttactcaagacgattcacatatattcatgttaccagagcaaattaaggacgaaataaaaggagtagctaacttaatagatggtatctacaaaacttttggatttgaatataatttagaattatctacaagaccagagaactctatgggaagcgacgaagagtgggaagcagcagaaaatggattaagagaagctttagaagagttaggtctaccatatactattaatgagggtgatggagcattctatggtcctaagatagacttccatctaaaagattgtttaggaagaacttggcaatgtggtactatccaattagatatgcaacttccaagacaatttgataatacttatattggtcaagatggtgaaaagcatagaccagttatgattcatagggttgcttttggtagtatagaaagatttataggtatattaatagagcattatgctggtaaattcccagtttggttatctccaactcaagttaagatacttcctatatctgataaatttatggattatgcaaatgaagttaagaaagagttatttgataagggtataagagttgaattagatgatagagctgaaaaaattggatttaagataagagaagctcagcttgaaaaagtgccatacatgttaatagtaggtgaaaaagaagtagctgataataatgtttctgttagatcaagagataaaggtgaaataggtagtattaaattagatgaatttatagctagtatttcaaaagaaattgaatcaagagaaagtattattcaagactaatatataatatattagtagctaagatattgttatataagataagtttaatcaatatgttgatatgttgatacatagtgattaaatttatgaaaagatgagtataattagaggtacagttaatcatatttttatgattaatgtacctctagttttttgtatggtagatttattaataaatatatcatagaagtgttttgaacatggaaatatttatgtgcattctttaaataaaagtttattttttgaatgataattaagtgcttgttggtaaggttatggctgtaaaaatcataactttatttttatatttgttccattttcataaaaattattatccctttaagaaaatttcttaatcctcttgaaatatttcctttttagtctaaagttaaatttctttcttcaaaatgaatatttaaatgaactaaaatttaagtacattttctaatcttatgagtctatttttcatagataattgccctataatagaagaatctatgttggggctatgtggtgacaataacagcattgtcagtgattaattaatgctttataaatgattaattagtgttttatgttatttttggacttaccctctatacatagattaatttatttaactttagatatagagagaatgtcaagtacatacacagacattagagtttaagaaagtgtttatggagcaagaacttttaaaagaagtagtgacttagtttaatttcaagaaatgataaatacaaaagaggaaaaagagaggtgttgaaatgatagaaaaagtagaagaaaaatctaagattattaaaacatcaaaagaatataagcgaactataattgaagaaaaagataaagaatggaccaaaaaattaaatgatatacttagtagaagtagtttttgtaatgatgaattagataaaatcaaggcgttaattccaaaagagattttgactaatgaaaatgttggagaagttgtgactgaagatggatatgctaagcccgagtatgatgaggtatttaaatcattgttcactttaaataatgaatatgatttacttgtaaattttataaatgatattctaaaagatgctccatatgctaacaggaatatcaaaccgttcactcaaataaagagaataattagagttgaaactgatccaacaattaattacattggagagaaaagacctagacttgattaaaaaatagctacgcacacttgtgactttagtcatgagttagtagctaaaatagtcagcatatagggaaacttatatgtagagataggatagaacctatccaatactacttgaattgctaaaaacccctaaagctaaccaaactaaaacataaggatgaaataaacctaagtgtgaaagttacgaaagtagaaaaaattggttagatggtataaggttaaaccctaagtactttaaaatgggcaatcagcaggtaagctccgaataggagaagcttcaacgactattcctcttgagggaagtacactacaagttattggtagtggaagtgggtagaccttagcggataatgccgaaggataagatatagtctgtgcttgaatgaaagtgtaagaagttcataagagaactgcataggtagtagcgaacttatgtgaacgacaacctcaaaaatgataaaagttaagacttacggttcttatatatgttatttaaaaataaatataaaaaaccttcaaaatacttgttttaagtaattgcatattttaatattatgataggtgatgaaaaatggaagttactcatggtagaggatatgcatatagtatgtcaaatacagacatccgtattatggggagacatctttggaatcctagttatttcgttgctactgtatcagaaaatacagaggagcagataagaaaatatattaataatcagaaaaaacaagtaaagtgaggtggtagtagtggaaaaagcttataagtttagaatgtatccaaataaaaaacagcaagagttaattaacaaaacttttggatgttgtagatttgtatataataagtatcttgctaaaagaatagaagtttataaaaatgctaaagaaacttttacttataaacagtgtagttctgatttaaccaatttaaaaaaagaattaaaatggcttaaggaacctgacaaattttcactacaaaacgccttaagagatttagataatgcatataaaaaattctttaaagaaaaagcaggatttcctaaatttaaatcaaagaaaattaatagattttcatataaaactaactttacaaatggaaacattatgtattgtggtcaacatataaaactacctaaacttggtatggttaagataagggataaacaagtacctaaagggagaatacttaatgctactatatctaaagaaccaagtggtagatattatgtatcattatgctgtactgatgtagatattgaagcatttgaaaatactaataatcatataggtttagatttaggaattaaagaattttgtatctcaagttgtggagactttatagaaaatcctaagtatcttaagaagtcattaaacaaacttgctaaattacaaagagaattatcgagaaaaacaatcggtagtttaaacagaaataaagcaagattaaaagttgcaagacttcaagaacatatagccaatcaaagaaatgattttctacaaaaactatctactaaattaataaaagagaacgatattatttgcatagaagatttacaagtaaagaatatgattagaaatcgtaaactatctcgtttaatttcagatgtatcatggtcagagtttattcgtcaattagaatacaaggctaattggtatggtagacaaattgtaaaggtaggtaaattctttgcaagttcacaaatatgcaataaatgtgggtataaaaacgaggaagtgaagaacttaaatataagagaatggatttgtcctagttgtaatgaaactcacgatagagatataaatgcaagtataaatatattaaaagaaggattaagactaataacaattcaaaataaataacttatgtaagaaccgtaggaactacggggatagcctgtggagaattagtaagacatatgttagtatgcaaaattctatgaagcaggaaccctgtgactttagtcatgggaggttcagattttggctgaagatgaagaaaataatcatataaatattgagatgcaaagagcttttgagaacgattatttggaaagagctgaatattatcttagtcgtgtacatggtagaaagttagaagaaggtaaagagtataaagaaattggaaaaactattggaatacatatactaaatcatgtaaaatataatcacatagaagattatgtaaattgcctgagattaacaatggacgagcatccagatatttattctagtaaaactgcattatattttatagagcttccaaaaattcataaatctgactatatagtaaatagaattatgctatggggaaaacttattgataatccttctagctcagatgtaagagttatagctaagaatgattctattattaaaaaagcacttgatagattaaaagaattaggtagcaatgaagaatatttattaaatctgaaaagaggtgcttatatcatgaataaaagtagaaattttaaagaagagattgaaagagagacagcaattagagttgcaaaagaaaaagattataaaataattataatgttgaaaaaaatggttttaaattagatgacatattgaataaatttaatgattttgacttaagtgaagatgagataaaagaagtatatgaaaataattgatgataaataaaaagtgaacttatataagtttgctgaatctgagcctggaaatatttatgtgtattttttaatgaataaaaatttattttaaaaacaataattagaggtacagttaattatatttttatgatactgtacttctagttttttctattgtagatttattatttactaataaatctacaatagaagtgcttttgttgtaagaatcattttatctaatgattgttttttataatagttaaatttccatttgtagtgcttaaatataaatttgtaataccatttttataagtgtataaatcactatgacgattcaactcaaagtcactgtccaaaacaccagaaaccttatcaaaatttaaagtgaaacctggattatcaggaatagacaaatcgacattggcagaagtagtttcacagtacagagaagacaacattttgctagaattgatttttatattactgctagttgactcagctttaatgtcagaaaaaactccagataagttcatttttccagaaactgaactacaagtaagatttttattgtatatatcttttaaatttatattgccattagttgtttctaagtttaaaacatcaattttcccagaaagctgtatttcaccagatgttgatttgagtgtagcatttttactatttagttttgttatatcaatgtgaccactagttgtgtctaaatttattttattaatattaccagagagacctattgcacctgaaattgtgttagcttcaactgtattacttcttatgtaagtgctatatatatctgctgaagtagtatataaggttattttatcataaagcttattgggcaaatatagttcaagtattgttggttttggaagattaattccaatgaagaattttttagttgaattatcatatatagaaagagaatttccgtcaaccattatttttgctagttttttctttgagaaattactagggattttttgaattaatttgattttattagaatcacttctcttaattctaacttcacctgaaatccaatcaacattaatgtcatttattttatctgaaaaactttcatttttagccactatatagttatcataattgtatttaggattaagagtattaaaagggaaattaaaagaatgtgaaattatagttcctataaggagtgagataaatacaatagaaagtgatattgccaggatactccagatgaaaatctttgcctttataagctttttattcatatttatcctcctccttgtagccttttagttgtataattcctttgacaatgttgacaccagcagcacctattataaatagtatccacgaaaaggaccaaatattaaatagtatgcttgtgattagatatatagaaactactataatccaatatgcattcataaatgatttataaactggatttatatgattataattttcctcaaaatcctcaaattctttgaatttatttgataaattatcattgtatagagcatagtttgtccttgtcatttgattatagactaataaacctactccaagtgctattaatatgagcattaaaagaatagctatagttggttctatgccaaaacttacaactgagactacaaataggaaagggcttattataaaaagagcaactgctattgatgctcttaaggctcttttctttttttcttcaattaattcagaaggtagagaatatggttccttaacactttcaattaactcagataaatcaccaattcctgagattactgagttatatgcttcttgttctgttttaccatcttgtatttggtcgttatacttttcttttagattttcaaataattcatctttaagttctttgactttttttgtctcattaactcctgtaaagctactgtcaatataagtacgtattttgtctaacatattttcacctcctaaattaatatatctatcaatgcttttgtattattccattcttcacggctttttatatatttctctttacctatgtttgttattgaataatactttcttctagctccagtaacttcatcaccccaataagaggttattgcaccagattgttcaagtctacgaaatgctgtatacaaagtagcttctttcaactcatacaatcctttggttttttcaagtatagatttattaatctcataaccataactgtctttttcaagtaaatgttttaagataattgtttctgtatgacctcttatcatgtcagatgcgattatcatgaaaatcacctccaattaaatatataatactttgatatacttcgcctgtcaaggtatatcatgagaaaagacattttattgtaatatttataaggttttatatagaaataatgtaaaaactttataaataatatattttatacctagttatagataactttatatagttattattaaaaaaagcaataaaaagtttaattcaatttagcaaatttagtgatataattaaaaaagaaaagaaatatggacttatttggaataattttgacaatctatttactacacgtgtagagtcgtatataattaaattatacataaaatataaaaaaataatttagtaatacgttaggagaaagtattatgataaagtcaagcttattttggaatattttcattgcgatatcctttatgatagaatggtttctttgtaagaaaatgctagattatacaagtgagaaaaggatttctaacaaaaaaataaacttttgtatggtaggtattattgtttttgctgacataatatatttttttgatgtacctccaaatataagagtaattatatctatgataattactattgcattttataaaatctcatatgatgtgggatttataaagtctgtattaatatccttaatttattggatgttactaatcgccacagatgctttgagtatatctttaacagtttggcttaattctataaatgacatgagtagtatggggacgggagatatatacagaattgagtctataatattgggaaagatacttttgattgtgtctttgtttttatatagagccttaaagataaaacttaatatagaaataaataaaaggacattattttatatagttattcctatagtcgctaatatagcatctttttttgtaatttttgaatacatatttaatccagggtctggtagcttaatacataatttccaattcgttatgatttctgttgtattgcttatatcaagtatcactttagttttaattgctaaaaaattacagcaatataatactttagttgtagaaaacaatatgattaaaaatactttgaagtatgaaaatgagtattatgaagatatagaaaagaaatatttaaaaactagattactaagtcatgatatgaaaaatcacatactgtgtataaatgctatgattaaaaaaggtattgatgttacttcttatttaaataatttgcaggtagaaattcagagtaatgacttgttatttaatactggtaattttatattagatgctatattaagtgaaaagaaagaagtttgtgataagaatgatatagaactaaaaataggaataaattttagttgttgtgaagctgttgaattagtagatatatgtcatatattttcaaatattttagacaatgcaattgaggcatgtaataaaattgatagtggaaatagagttatttgtgttaaaggtgatgttatgcaaaatttttatttaataagagttgaaaatactaagatgaataagattattactaaaaatggagatattttgacagacaaaaaaggttctcttcatggacttggaataaaaagtgtaaaaaactctgtaaataagtatggtggtaatgttgtaattgaatatgatgataaaaaatttgtagttaaaattgctattccacttagaaatgtgaagaaagcagttaatcatgtgatttaaatgtatataaatttgatgtgtagaaatttaatatataagaattaatgtataaaagtgatgtatagaagtttaatatataagaattaatgtataaaagtgatgtatagaagtttaatatataagaattaatgtataaaagtgatgtatagaagtttaatatataagaattaatgtataaaagtgatgcataaaagtttaatatataagaatttaatatgtataaaagtgatgcataaaagtttaatatataggaatttaatatgtataaaagtgacgcataaaagtttaatatataggaatttaatatgtataaaagtgatgcatagaaatttaatatataagaatttaatatgtataaatgtggtgcatagaagtttaatgtaaaaatttggtgtataagaatttaatatatatatttattttaatatataaattgaagatatataattaaatcatataatgccacttgtatattagaattgtttattgagtattagaaacttttaaggttagaaagtttatgactattatacattatattatttatagtatttattatagattatatagtgagtttaaaatattaaactttttattctacaaaatataaaaagaagttgcatcaaaaagagaaatgctctttaaagatgtaacttctatggtatatgtatgaggagctatattgccatctctggaatcaagcttctcatagcttctatagttgtttggataagcttatcaagttcccatccaagcatttctgcaccacttcttataacgtctcgagaacagccagcagcaaatgatttatctttaaatttcttcttaacagattttaattctaaatcagaaacgctctttgaaggacgcattattgcaacagcaccaattaaaccagtaagttcatccacagcaaataatactttctccataaattgctctggtttaacatctgaaccagttaatccatatccatgacttattgtagaatcgattattgatttatctaaatcaagctctgtcattaattctctttgtttaacacaatgttcatcaggatacatttcaaaatctaaatcatgtaaaagtccaactatttcccaaaagtctactctctcagggtcgtactcctttgcatagtatctcataactccagatacaatttgagcatgtcttatatgaaattcttccttattgtattttcttaatatttcccatgcttgttctaaagttggcatgtaactcatttttatcactcctctagctgaatattttgaatttttataaagtttattttccattgattatatcaatcaatttctaaaacgtcaacatactgatacgcaattttgcatttaaattcagaaattagtgaaaattaaatctttatatctaaattctttgtatctaaagattttcgttcctcaatgttatctttgatacaaatgctataagtagtgtaataaatccaactcctagtataatgatgtacactctatctgataataaatcaaaaagtttaccatacataacctgaccaagaggcattgcaattgctgttcctgcaaaaagaattgacattacttttcctaagagttcatttggagtttttaattgtgtgactgttataacatatattgagataagagtcgttgtaaaaaatattagcatagatgatactataaagattaaaaatggaactggaaatcctgtgtttaatataaatggatatactgaaaccgccattggtatgaacataactgcacatataataaaggaaatgtgcaaattagtgatttttagatgttttgagaaaataccaatactaacagcagctaccagtgaactaaaagaaattgctccttctgctagaccatataagaagttactagctcccatagtgatttttactatataggggataccaactattaacatagagcttaaaaataagtttattgctatagctaaaaaaagtatttttagtataaatctattttctttacatatatgaacaataccatcctttatatcagtaaatatagtttttataatgttgctgttttgctcttgtttgataaaaggaatctgtataaatatctccataattgcagatagaaagaaacttacacaacttataactataattgcattaattccaatcacaccatacaagacacctcctaatacaggtcctgcaatatttgtaagagatgcaactccagctacaataccatttgcattcattaaatgctcattatcaactaaaaggggtgtacttgactgaacagttggttgatacattgtgcttataactgataatatggtcataataattcctacaagtaatattgaaccattattgttgaataagaatactgctaagattagtactgtaagactgcttgaaaaatcaaaaataaccattaagtttcttctgttgaatatatccgcaatagctccaccaataggggagaatactataattgggattgaagatactgctagtatagtagcaaatatttctgctttaccagttatatcaagtatgtataaagataaagcaaatttaagtattgatgcaccaaacaatgagattatttgacctaatatcatcaagttgaagtttttattaaaagtgtttgaggattttaccatatatatacctacctatctaagattattaaaatatttataataattgatataatagcaattattataaggaatttttttcttactttaatatctaatattattagaaatatacgaactattatagatggcttagagtagagtggaatgagttaactctggggtctataagttttgtgtgtatatttagtttatcatttattttgtaaatgatattgtttatttttttcattaattcaatcatattaatcctctttagtataaagaaatatttagaaaaattattttaaattgttattcaagtatgtgttctacaagattatctaccataaaatcaaatacttcaatatagttatattcaatattttcttttaccaatagacttgatagtagagaattacaaacaccaaaggctttttctttttctatcttcaacttgagattgtgtctcttaattaagtcgtaaaaactttgtatgttattggactcaagttgtaaaaacatatcttgaggtagtttatttattaggctgatgaaatcaggattatttggtgaatataaaaatggatttttatcatataatcgatataacatttttaaggattttgcaaagccttcttttggaggcatgttacttaaaatttcatctactgatgatataagtctgttttggattccatttagtacttcaaaaaataacttttcttttgaatcaaaaaatgtatagaaagaaccctttgcgattcctgattttgaacaaagttcatcaatgttagtttttttgtatccatatttagaccagttgatttcacattctgaaattagtctttttcttatattgtctttttctatttctgtaaaacttttagccatttttatcaatcctttctatctgcatatgctatctatgactttaaaaatattttaagtcatagatatataatattgtctacttataaatttgtcaagtgatttatgtttataatatttatattggtatattggtatattggtatattgatattaaagtgtgacctatatagatttggagcgagtatgttattaaaatagaagaatctagaaaaacgttaacttaaaattttttttataggtaaacgtttatgaaaaaaagaaatgtttacataacgaataaatggctataatttaaatacacaaagttatatcagagagaggaataaaaatatgtttaatgaacttaaaacaaaagaaaatgtatataaaaatttaataaatggaaaatgggtagaatctaattcgagaaagccaatagaaatttactcaccaatagataattctcttgttgggaaagtacaatctatgacaaaacatgaggtagatgaggttataaaaaacacaaaagagagtataaaagtatgggctgaaatgcctgtatacaagagagccaatatatttcataaggctgctgatttattgttagaaaatatagatgagatagctaatatactggtacttgaaatagccaaagacataaaatctgcaagggcagaagttgagagaacagcagattttttaagatacacagctgatgtgggaaaaaatatggagggtgaagccattagtggagataatttccctggtggaacaagaaataagatgtcttatgtttcaagggttccattaggtactgttttagctatatctccttttaattatcctgtaaatttatcaatgtcaaagattgctccagcgcttattggtggaaatgcagttgtattaaaacctgctacacaaggggctattagcgcacttcatgtggtagaaatcatgagaaaagctgggataccagatggagtacttaatactattacaggtaggggtagtgagataggggattatgttgtaacgcataaaggaattaattttattaactttactggtagtactgaagttggtcagcatatatctaaaatatctggaatggtaccactattattggagcttggtggaaaagatgcggctatagtattagaagatgcagacttagattttgcagctaagaatatagtatctggagcgtattcatattcaggacaaagatgtacggcagtaaagagaattttagtacaagagagtgtggcggataaattagtcggaaaaataaagccattggtagagaagttgacaattggaaatccaatggatgaagtagttatcactcctcttatagataataaagcaactgattttgttcaagggttggttgatgatgcattacataaaggagcaaagttaataacaggtaatgttagaaaaaataatttattctatccaacattgttagataatgtaaatgttgatatgaaaattgcttgggaagaaccatttggtccagtacttccaattataagagttaaagatataaatcaagcaattgaaattgctaatcaatcagagtatgggcttcaatcatcagtatttacaagtgatattgatagggcattttatatagctgataaacttgaagttggtactgttcaaataaataataagactgaaagaggtccagaccacttcccatttttaggtgtaaaggcatctggtatgggaactcaaggtgttaagtattcaatcgaggctatgactagacctaaggcagtagtggtaaatgttagggagttgtaataaataaatagagataaagaatagtagagataaagaataaaggagttgtcttaaatttgattttttgtaattgaattttaagttcaactccttttttgaatctttatatgttatttcttagtaattctttttttattaatatcttaaactttgatattgatgaaatttgaacatgataaatatctcaaatttatagtcttgttttctaatgatgaagcctatttctacttaaatagagcaatttctaaaatgaacatttttatctcgagtaccatatacaatgaaaaaaattaaccttgacaagtgaccgatggtcgctgtatgataaataaaaaagaaacgaccattggtcgctaaaaggaggtatcgccctatgccaaaaggaattgtgcttacacctgaacaacaagcagaacgccgagaaaaaatagttgctgttgctttgagtctcatggctgaaaatggattccaaaaaacatcaatgagagaaattgcagttttagccaacatgggaaagtcaagtctatacgattttttcaaaacgaaagacgagattgttgtatatgcagttgagaaagaaatagaaaaaactatccaacaagttcataggattattgatggtgaaccttcaccacaacagtgccttagaaaaatcatgcttaatcatcttagatttccagagcagtatagaactgtactgatgtggttaaatacagaatctgattatttagaagaagagtatcgaaagagacttaaagatgctcgttatgcatatcaagatattataaaatcggtaattgataatggtgtgaccacaggcatctttcgcaaaacggataccgctcttgtgacacgtttgttaattaactccatgttatcaatcagctacacgtcacgaccatcggatagttcggaaaaaatgttggatgaaacaatgaatatatttctgcacggaattatgaatgatggaggtgaatgattatgatttattatgtcttgccactggaacataaacaagcaaccattgaaattgttggtggaaaagggatgtctttatcaaaactattgacagcaggcatccctgtgccagacggttttcatgttacgactgcttcataccagatttttgttgagacgaaccatattcagtctcgaattaataaactgctagatggtattgattccaataataccaaccaacttgaagatgtatctaagaaaataggggagcttttccataatggagaaatgccacaggaagtgtcggacgcaattaaaacagcttatgccggattagggaacatatcggtggctgttcgttcgtctgcgactgctgaagatttacctgacgcttcttttgcaggtcagcaggaaacttatcttaacatacaaggtgaagataaagttattgacgctgtaaagagatgctgggcttccttatggacagctcgtgctattgcttatcgtgtgaagaataatataaagcacgagattgtcgcacttgctgttgtagtacaaaagcttgcattttccgattcatctggtattatgtttacgttaaacccaatcaatggtagacgtagcgaaatgattattaacgctgcatgggggcttggtgaagcggtggtttctagcttagttacacccgatacaatcgtagtggataaggactccgaacgaattatatcgtatgaagtggcaaataaagagattatgacggttcgtacttcagaaggaacagaagaaaccatggttcctgaaaggttgagaaaaaaatatgctcttactcgtaatcaggtaatgcaactgatacagcttggaaagaaaattgagaagtattatcaaatgcctatggatgtagagtgggcactggaaaaagataaattgtacattgttcaagctcgtccaattactgttctgccaccggaatgggtattgccagaacaggatgttgtatacacaaagggaagtttggcagaacacttgccaaatcctgttacacctttgttcgccacgcttggtcttgaaatcgtaaaccgtgcatcggagcttttatggatagatatgtttggtaaaagtgcgaaaaaattattaccaaaaaacggcgcatatacggttattaatggatatgtttatctttctgctaaatcaaagccacttttgattgctatcaaatccctttccccacgctctttacgtaggacacttatgaacagcgttgcacgctgggaaacggcacgaaaaggatatgaggatgctattaaacaatgggaagaaaagcccctgcatacgatgaacgcccatcaaattatggatggtattcagacaatattttatgccgcatgtatttatttcacaaggattcagcttacattgcctgctgcttctatcagtgaaacattatttacaaaattatttcaaggagcagttcgacgtgctggtataacggatacttccgttttcctgcttgggtttgatacgattgctctgcaatcggaaaaggagttgtggggtctttcagaatgggtaaagcaaaataacagcatcaacctttatctgcaaaacagtcctgcaataaagatagcagaagatttcatgtcttcagttatgcctgttggagtttcacaggaagtatggatagaatggaaaaatcgaatcaataagtactttaaagagtttggtcgtaccgcttatgagtttgattttgcgtattccacaccgcaggaaacacttacaccaacttttgaatccgtaaaaacatttgtggaaggaaaaggggaaagtccttttttacgccagaccacgtttgaaaagcgtagaaaacatgcagaagaagagattttacaacacataggtggattgcgtaaaaaactattttttaagttgctccattgggcacaggaaacctctcctatgcgtgaaaatgctatttatttgatgggaatgggacatcctctgattcgttgtatgtttcaggaaatctcagaacgattcatacgaggaggagctatttcacatttagatgatatttattggctcacaaaatcggaattggaggtacttatagagcagttggataaaaacaagtctctatctgatatgaacgggataatacctgttcgaaaagctgaacttaaaaaatacatgggttatgtgtcaccgtccaagttgccagagaaaaacaaaaaaactatatcacaagcaccacagaagcagaaagatgggaaaattgtgttgacgggcattggtaccagtactggtgttgtgacggctccagcttgtgtactgaatagtccagcagattttgaaagctttcaacctggaagtgttttggttgcagttaccacaactccagcatggacaccattattttcatctgcaagtgcgattgtaacggacattggtggtcctcttagccattcaagcattgtcgcacgtgaatatggcatcccagccgttatggctacacacattgccacacgaactattaagagcggacaaatgataacggtggacgggttggcaggtacggtgacgtttgatgagtaaaaagcctattttcgctttgaagctttcgacctttgtgattgcgttagcggaagtagtaatacttaaagttttcagatttcataatactactaatacccaccgaacagcggtaagaaaaaccgtagcttggtgggtattttcttatgcaaaaaaatgagaatgtctcaaaataaaaatttgattagaaaaaatcaattttgagacaattcctttatttgttgatacaataatacacttataataagcaattttatattgttaattggaggagttttgaaacataagtttttcaaagtcttttatttgcaaaggtctagagaacacgtatccttgtaacatatcacagtttatttcttgcaagaaatctttttgaaaactggtctctattctctcagctacagtggtcatttttaactttttagctagttcgattatagatacaattatatttctttcacgttgagaatctaaatcttctgattgaaaaaatgctctatctaattttaatgtatcaacataaatacccttaagcatattgattgaagaatagccacttccaaaatcatcaatagagcatttaaagtcatttttatgaatttcatttattatttcactaaatactttgacatcttcaaatacaattgtttctgtaatctcaatttctataaggtgagaaggaatatcatattttttagctattttatcatatttcttgataaaattcttggatgaaaaatgataatgagacatattgttttaccaatgtcgttacatctgaatatattaaaagatatataggcttatcatcttcccaatctatacattcagctacaacttgcatgtgaaaaatatctccattaatagtttgtggagaaatagaaaaacaaacgcatctcccagatttaaaatcattatgatatttatacacattgttaagataaccttctaaatttatatcatctaatagaaaatttacattatctttgaacatatcaaaatattttttattagcatcaagaagttggaatccaaagtcagttaccttaaacttggcaatgaggcctggaaaattgttgtatagaatatattcaaagcaagatatgtctcatattttagaataatcttattatatgtaaagttaagctattttataagtctttttatccagttatgcatttttattgaccagttagacgtaatatattgaatattaagaaaattggtactatcatataaataaatatatatataaaggaggtttttatatgagtctttttgttggtggatggtcaaaatttagggctgtcgaagaagaagatttaaaagtatttaatgaagctataggaatgctaaaaggggttgattatgaaccacttattgttgctactcaagttgtagcaggaacaaattttaaatttatttgcaatgctacttcagttacaaatcctccacatgattatttagcagagataattgtttttaaacctcttccttgtgatgaacataatgcaacaattacaagtattaatataattaagtaatattaataggaggtggaagatgagactaaatgtaactaaacaaaatactatagaggttgaaaatagtagaaaagaagatgtttattttgtaatagttgataatgttttttttgaacgtcaaggtgatgtatttaatagtatcacgaataataatttaaataattatgatgtaaaaatattaccaactgataatgtttttttagaattaaaaataacatctactaaagatttagaacctgtttttattgtagttgaagatagacaatacaatcatggtagtataatgtttaagccagtattggtatagaatttaagcaaataaaagtgaactattcaagtaggtataggtgaactatttaaactaaaggaaacctattaaaccagtatagttgaactatttaagcaaataaaaataaaatattcaagctggtataggtgtaaaacttaagcagtagtataggaatgtttaaattaatggtacaaatataattaaaaatctatatgtaataaccataggaaaatagtggacatataatataaaaaaacaactgtattacataaaatacaataaaataagcgcattaaataaaataactgtgttggtaaaaattatattatacaacacagttattttaataaacaaagaagaataattattgagtgaaaatgcaaatttattaaaaataaaaaacaaatttaaatatagtctaaaaactttgtaatctacttaagggattaaactttatttaaataaaatatataaccaagggggaaaataaatgccagaaaataacaatcaacttttagaagaaataacactcttattaaatgaaggaaaagtagcaataaataaggctgaaaatcaaaatttaattctaattcttggtgggacaggatgtggcaaaagtactgcaattaactatcttgcaggatgtgtaatgatggaagtagaagatgaagatactggtatatcatatattgattgcttagaccctgtggcagagattggttcaggagctgtttctcaaactttatacccaaacattgtaaatatgagaaaaccaatagaaggaatggatgcaaaattatgtgatactgcaggttttagcgacaataggggagtagcccatgatattagtgcagcagtttcattaggtgaagtatttaaaaattctgcatctatatgtgcagtaattgtattgattaaaaaatagctacgcacactcgtgaatttagtcatgagttagtagctaaaatagtcagcatatagggaaacctatatgtagagataggatagagcctatccaatactacttgaattgctggaaacccctaaagctaaccaaactaaaacataaggatgaaataaacctaagtgtgaaagttacgaaagtagaaaaaattggttagatggtataaggttaaaccctaagtactttaaaatgggcaatcagcaggtaagctccgaataggagaaacttcaacgactattcctcttgagggaagtacactacaagctattggtagtggaagtgggtagaccttagcggataatgccgaaggataagatatagtctgtgcttacatgaaagtgtaagaagttcataagagaactgcataggtagtagcgaacttatgtgaacgacaacctcaaaaatgataaaagttaagacttacggttcttaaatatgttatttaaaattaaatataaaaccttctaaataattgttttaaataattacatttgttaatattatgataggtgattaataaattgttcaccacagtattatacaatatattaaatatgataaaatcattaaaatgtgtatcaaaaaacaattagagtgaggtagtagtagtggaaaaagcttataagtttagaatgtatccaaataaaaaacagcaagagttaattaacaaaacttttggatgttgtagatttgtatataataagtatcttgctaaaaaaatagaagtttataaaaatgataaagaaacttttacttataaacagtgtagttctgatttgaccaatttaaaaaaagaattaaagtggcttaaagaacctgacaaattttcactacaaaacgccttaaaagatttagataatgcatataaaaaattctttaaagaaaaagcaggatttcctaaatttaaatcaaagaaaactaatagattttcatataaaactaactttacaaatggaaacattatgtactttagtcaacatataaaactacctaaacttggtatggttaagataagggataaacaagtacctcaagggagaatacttaatgctactatatctaaagaaccaagtggtagatattatgtatcattatgctgtactgatgtagatattgaagcatttgaaaatactaataatcagataggtttagatttaggaattaaagaattttgtatctcaagttgtggagactttatagaaaatcctaagtatcttaagaagtcattaaacaaacttgctaaattacaaagagaattatcgagaaaaacaatcggtagtttaaatagaaataaagcaagattaaaagttgcaagacttcaagaacatatagccaatcaaagaaatgattttctacaaaaactatctactaaattaataaaagagaatgatattatttgcatagaagatttacaagtaaagaatatgattaaaaatcgtaaactatctcgcttaatttctgatgtatcatggtcagaatttattcgtcaattaaaatacaaggctaattggcatggtagacaaattgtaaaggtaggtaaattctttgcaagttcacaaatatgcaataaatgtgggtataaaaacgaggaagtgaaggacttaagtataagagaatggatttgtcctagctgtaatgaaactcacgatagagatataaatgcaagtataaatatattaaaagaaggattaagactaataacaattcaaaataaataacttatgtaagaaccgtaggaactacggggatggcctgtggagaattagtaagacatattttagtatgcaaaattctgtgaagcaggaaccctgtgactttagtcatgggaggttcagaccagaagcagatatattagattctagacttacaaaagtactagacctgtttcaacagttaaatatgtgtcttcataaagacaattttaggggcagtataacttttttcatttcaaaaagtttcttaggaagaacagaaaaacaaatatataatgttataaaaagaaaatatgaacaattatgtgaaaatttagatagtaatatagaggaaaaagcttggttatttgaagaattgctaaaagataatggtaaaaatattcatctttgtaagccacttgaatcagacgagagggaaggcttattaaagcaagtactagaattagatgaagttaaagataagacatcagcattccaatatccaattagtgcagatgcaagattagttttagatacgttgataaaagaaattcaaaacaatatcgtatctagcctagaagattatgttaaggcgtatacagaagattttatcagtattattggaagtataacaatgattcaagaaatagcaaaatatgatgaggttgtaaaagtatttaaaaactggttggaaagtacaacaactcttactatagagagatttatcaacgtattagccaaacaaagtggcttattcttacaagatagttgcatggaattacaaaataagataaaaggaaacttagatataattgatgctttaagtaaatatacagaacatggaactggggaaattttattaccttctgtacatatggaatttattatagaaaaggcaagtaagaagataatggaacaaaacttcattataataagaaagaatttagaaaaagttttagtttcttatgaagtacaaaaacaggtatttacattaccaaatagagaaaaattaatggaagttgcaaataaaaaggattatgtatatagtgtaagtgattttaattcaattttgacaaatgttacagttacacaaaatgaagagttagaagacagtataacaagattaagtgcatatggagaagaaggtaatgagataattagagaatttattggtaaatacattttaaatccatttatagtaaaaacaattaatattaatgataagaaaggtattgaaataagagcattaattccaaacttagtaattagtagtgtattggaatatttcaaaaatagaaaagtagatgacaatgtttctacatttatgttctttgccaaagatactatttatatggatgataaccttggaatggactttgcatcagagaaaaatattattcttgcttgtaacaatcttgatgtaggtagtaatgtaaaaattaatgtaagtggaaagagcggagaacttgtagatagttctatgtatgggaaaaatggtgaagatggtagagatgcaggtaatatttacttatatattaaagaagaaattagaaattatcgtttaacactgattgcaaatggaggaaatggttctaaaggaatagatggtaaaaatggtgaaacaggagattctggaagtaatggagctgatgcaggatatacaagtagtttccatggacagatgtttaaagggtattttgcaaaaggtacaagtggtaaaaaaggtgacaaaggtggagctggtggaaatgccggaagaggtggaaatgctggtaataaaggtaatatttacttcatttcagactcagaggaacaaaaaaatagaataattaatcattgtgatataacagtgaaagatggagaagcaggtccaaatggtagaccaggttcaggtggatatggaggaagtggtggctatcacggatataatacactttcattttctccaagtggtatagataagactgtttactatacaggatattttacaagttgggattataagttagatagtataattaaatatcatatagaatttagtggcggaagttggaatgaaggcaaaacaggaccagcaagagaatacgctgaatatggagatagaggagacgacggaggatttaatgctccaaatactaagttatcaacagctgtttcaaaggtagaagagaatcttattaaagaaaaatatcaaggctattgttccgaaatatagaaagggatggatgtatggcaaataaactttatagtgaaatcgtaaaccttttggaagaaggaagagacgagcttagaaaatatgacttaaaagaaaagtcaattttgttattcttaggtgcttcaggcgttggaaagagtacttgtataaattatttaaaaggttgcgtgatggaagaaaaaacggatgaagagactggacaaatatatataactgcaaaagattcagctgtcgaaattggaaatggtgtatattctaagactttatgtccagaagttgtagatattgcaaatagaaatttttcattatgtgattgcccaggtttttttgataaccgtggagcagagtatatgattgctggtgctatgcttgtaagggaaactatttctacatcttcaaaggtgaaagggatggtagttattttagactatcaatccttactggactctagacatacattattgatagaaacaggcaaaaatttgaaagatatgcttggtgattatgcaaagtataaagaaaatttcttctttcttatcaataaaatacctaaaacactaatcggtaatgtaacagaagaaaaaataaggaatatattggaaaaagcaaaagaagacctagatagtcaagagaaagattacgacggttgtaaggaattagtgtacttattaaatgtagcattatcagatggtgtatctattaaattatgtaatccactagatagacagccagaaaagttgttggatgaaatgaaaaatctacctgaaacatttgaaaaaacagatttgggattgatgcttactgcttcttgtaaaatagaaatacaaaaagccgttgatgtaacctataaagacctagaaaaacttttagttccttatatagaaagtgtcaaaaaaggtatggaagattctatttccattctatcttctataaatagtctaaaggataaaaagactcaattagataagatgtatacagatttatgtagtaggactaataatatgaaagagcttatggagtttgtacaagaactttcatatggtgatggcgtacagaaagtgaatatattagaagaaacacgtcttcttttagagttaaatagctactgtagtgagactcatattgttggtctaagtgagttgttaaaatcattgctaaaaaatactttagaagatacattaaaagatatcaaatattggatagcagaagaagaatatagggaagaagaagccaaaaagcttgaagatgcagagtataggatagagaagattcaaagttgtacatatataaaatcatatgagaaagaaaatgtactttctatatatattcctatacctaaagtgaatttatcggatttgactaaaataatatctggttatcaacttaatattttgtcatctatatatatgtatggagattgtgagttgaaaattgactgtaatatggagaaagaagtcttctcaggtaagaatattgtactacttacagaaaaattatgtataccagaagggatttattcaatcaacgtatctggtaaggatgcagaaaaattggttggagaaggttctatttacgacggaatgaatggaagaaatggcaataatgcaggtacttcaggtgatattttattatcttttaaagaaatagaaaaaagaggagaacttaaactttacgtagatggtggacgtggtggaaatggacaagatggaaaaagaggagatacagggataactggagaagctggggaaaatgctaaaataggttctaaaaaagagtcaaaagaatttgctaaggttaaaggtacaaaatactatgtggtaaaagcagaaaaaggaaaacaaggtggaactggaggcacaggaggtaatggtggaaatgcaggtcttgggagcaagtctggacaggtttatctccttggaaaagcttctttattaaaaggtgctataagtaaaaaagatggaaatcatggtctagcaggaaaaggaggctctggaggagctggtggtgcaggaggtcttggtggaattagaggtatatatgaagaaacaataagatatataggtacctctgctccaatagatgacagtgatagaaattactattattttgatagatatgtgtttaatcatgcttcaaatgagaaccaagtagcagatgatggagagaaattaaatgctctttatgaaaaacataaggactggacaattagcaaacgtgaagattcaggtttagtcggagcagagggaaaagacggtcgctctggagatgcattaaaagaaaaggaattgttaaagcaggagtattctttgtcaatagataccttcttctatgaatttttcgagagatttggtttttctggaattaaaggttatagaaatcttagactgttgtgtgcagtgggaattttagaagctgatattttagaactttcacatatttatgaaatttttcatgcagttgagaaaatagagatgcaattaaatagagaaatacttcagaagtactatagttttgagaagaaaaataaagcagtgctttctctggatgatatgaatataaagaaagaattttataaggaggcaaaggaaatctatgaataccttataaataaattgatgcagtctgatagaatagaatcttttataggagaaaagaagaattttagcgaatggagtatgattttatttgcacttgaacaaaaaacagcattctatgtgcagatgattgaagaaagtgaaattggaggaaatcgtgttacagatattcgttctttgacagattatctggacaagaccttaagagaattggaacaaggaaagaaagatgagttaaaagaaggatatttcaatacttataaggaaagtatcctaactcaaattgaatctggaaatcaacaaatagaagttttaaaagatgaacttgagaataaaatgctttctgttaatgcaaagatgaacctgttgattcaagaaattataaagatgaaagaagaggagcaagaagacatagaggaactaaaaaagaaacaggcaaaacttgaggaacaaatgaaaacacagttaattctttctggaatacaaagcgcattgagtttactgactgcatttagtggtgttggtcaagcttgtctaggggcatttgacagtgcaaaatctttgaaggaaaatctttcagctaaagaagaggaataccaatggactaacaggatggttgatttttcagattttaaattggattctgatggtatgagatttgtacttggagaacagctaagtgaagatagaaaaaatgctttagataaaatgacttataatttggcaggtgttgatgaagaaagaagaactaaatttgaccaaattaaggagattatagttaagtctatagatgatgataactatgcagaaaaagctgacgatattcaaagagcaaaagaggggttaagtgaaagcgagtataaggaaatttacacaaaaatccagaaaaaagaaataggtatgttggaggcaaattacaataataaacagcaaaaagataagttagctgcactagagaaaagtaaacaagctattgaaagacagcaaaagacatctaaaattaaaaatgcattgagtattggaagttctgcttgttctcttataaatactgcgattagtggtgttaataattgtcttaatgtaaaatctagttttgagagtaaaatagaggtagttaaagaggcaattaaagataaagaaaataatattaagaaattagatgaattgaatactcaaatggtggaatttaaagataaaactttgaaagaatctgttataccatttgtagaaaaattcgatagtacagttaaaaatcaagatatttttgaaaatgagataagtaaattaaagatgaaggaagttttaactgaattaagcacaaagtttggaagcttaaaaatggaaaattcagaggagatttctataatatttaaaaaagtacaggatatgatggaaactcaaattatcattactgataagattgataagaaaaaagataatcttgcaatgggagaattgatttatcaaatgtcaggtagtggtaatcagatgaatgaatatcagaaaaaacttatccatcaaattgaattaaatcaggttagatatttgtgtcaggttgaggcagcagcttttcaactatggacgtttccatttggaagcaatatagtaaatatcttaaatagatgccatgtaggtattacagaagatgaaaacgaggttataaatcaggcgaaagagcaaaatagacagattagagagtttcttgaccaagatgcttaccaatggcaaaaaacggataaccatattttgaaggtagcattaacaggcagtttagatgggaaatcacgtgtgggatttgaaaatacatattctctatatgattgtaatgaagaagaagtgaaaaagcttttgacaggagatgaaattagttttgaagttccattaaataaaaactttgatgccataaaatatgtaaccatgtatgcaaatatcccgaaccttagacgaaatattttagaggatagtttaaaagtaaaggtgcatattcatttatatgatagtggatacttctccctatatgatgataaaaaagatgtctattatcaatatgtatttccacaaaactatatagatattacacatggtcttgatgttaaatacaatgattcagattcaataaactcaatatggtcttcagtagaagataaaggaattgaaaagttcaaaaatgcaggattaaactctggtagaagtccatattctatggctaagatttctttgaaggcacattttaataagaagctttcttatgattcacttacaaatgagcagaagaagaaactagaatcatactttgataaacctagtaagtatgcatggagcgagagtatagatatattgaagagtctagggtatattgatttgaagggaattttgtcaaagagttggtatgaaatcaagaaagatatagatagtgatggggagattatgaagcatttttctatattacaagttgatttattggaaagaattatttatgagcagactagtatactaaaggaaaatatacctaatttgacaattgaattggtaggctgtggtatttatgtagagtctgaatttaattatctaaagcaaaatgatttaaaatgctatgaagaaagattggttgaaaatacaattatttgttgaaaatataattaatatataagttttaaagaaatttacaaaaggggatgtttcaaaatgaaaatttgaatcatctcctttttgtaaaaaatagaaataagttgagtttaaaatttgtaaaatatgttttatataattttgattagaaaaaagctccttttaagacagtttctttttaaaagatgaattataaattttttatatacatatgttttatataatggggattaatagtagttataagtattggtgttttccaataaatttgtcatactgtttaaacttattccaacagtagatgcgttgtgtaaaaaggcagatgtacttggtctaacaaatccacttacgccaagtaaaatcagacctaaattaaagccgataataaacttagaacttaaatcaactcttttcataagcttattactaatctgctttaaaacgattaaattattcaaattatctgctgatatggtaatatctgaaatctctcttgctatttcagcaccttcactcattgcaattccgacatctgattctgaaatagcaggagaatcattgattccatcaccaatcataattactttgcgaccttttagtttttcacttttaacaaaattggctttgtcttctggtaagacttctgaataatattcatcaacaccaactttacttgctatagatttagctgttttttcgctatctccagtcatcatcacaatcttttttattccatattctcttaaatttgaaattacatattttgcttcttttcgtaaagggtcatttatgcaaataactgctgataatttacccgatattgccataaataggtgagaatactcatctgatagattgttgtacttatcctcctcaccgtctgggatagtacacttctcatcttcaaatacaaaatgtttgctacctattacaacctttttatcatcgacctttgttgaaatgccatgagcaataatatattctacctctgtatgcatttctttgtgactaagcccttgtttttcagcttcataaactactgcatttgctatggagtgtgggaagtgttcttctaagcaagctgcaagtcttaacatatccttcttattataattttggaatgtaattatatctgaaacagttggttgagcttttgttaatgtgcctgtcttatcaaatacaatagtatctgcacatgcaacaccttcaaggaattttccaccttttacagcaatgctgtgattgttacattctctcatggctgatagtactgaaatagggatagagagttttaatgcacaagagaaatctaccatcaatatagagagtgattttatagggtttctagtaattgcataggttaatatacttcctaaaaagctgtatggaactaatgtatctgctagatgttcaaatttactctctacagaagattttagtttttcagattcttcaatcatagttactattttctggaatctagtagtaccagctttttccttgacgcacataacaatattgccttgctctattccagttccagcatatatgtaagagccttcttttttgttaactgcaagggattcacctgtaagtgatgcctgattgaccattgcttctcctgatactataactccatccaatggaatcatatttcccatagttacactgactaaatctccttcctttatctctgaaattggaactagtatttcagtggcatctttttttaaccatactttttcaatgtttagtgacatactttgagccaagtcgtctatagatttttttctagtccattcttctaataactcaccgataccaagaagaaacataactgaaccagccgtattgatatcttttctaaaaatagaaatacctatagcagtggcatctaaaacagaaatttctatttttttatttagtagggaagagagaccttttttaaaatattttatagaatgaagtccaattaaaaaaaatcttaaggactttggaaaaaatattttggagatacttttgactagcagtttatttgctaatttgtctctataataattgtttaattccctgctggtatgttcaggaactaggttttctattttgctattgttaaaactgaatttagtgatttctcttattatgtattctctttcaccagtgtaataaatgactgcatcaccagttctatcgtaaacttttgctttggtaataccatttatagaagttaaataatataagagagtatcggactgcttgttgtttaatttgccaagttgtaagtcaaagcgtatacgacctcttatttcgtgttttatataaaaattcaatttacttcctcctgatattattaatcataataatcattaaatttattctgttgtacaagtattatttttttcttcaattacgttatctttgatttcttcacatttaatgttattagaattagtatcttctacagtttttatagtttcagttttaagaacttcttgttcgcatttaagagtatcttgtacaacgtttaccttagatgtagataagtcttcttgctcgttgatttcttttgcttcagctaaaatatcttctacattttcttgaattttcgtagttgtttcaagaacagaatctttaactttcaatgctcctgctgttgcacgagtgcaagttttttttacacagtcacttgaaagtatcttaacacctacagtaccaaaaagtactcctcctaaaaatattcctgtttttttcatttttaaaatattcattttacattatcctttcatttagttagattttgtttatacttatgtataaggtaacaaatgttaaaaatagagtatgttttacaaaattagtttagagagtttagtaattttatttgatttatattagtaaatttacatgaattttacatgtgtagtttatatagttgaaataatttttatatagcttatatatgcagtttatatatctagtttatatatctagcttatgtatgtaatttatatatgtagtttatatagttgaaataattcttatatagcttatatatgcaatttatatatctagcttatgtatgtaatttatatatctagcttatatagttgaggtaatactttatatagcttatataatttatataaatttataaccgaatactacacagtttatacataacatattgtttgagcttatctagttcatataaatttataacttatataaattttttgtactttgtattttagaaagttcttgatatttagtccaaaaactttaaaatacagtaaaagtaataattgttattaatagatttgtaaaatcatatgacatttattaccatttatgcaattaagtatagcatgtgtaaatggtattttcaacagaaaatgataatttatatcaattaatttagttgatttgtaatagagcatcaaaaagtatacttatttatatatgggaatgaaaggcaaagttttagttttttcaattaaagtgcgttagatatattattataaatgaacattattttaagtataataatgattaggagggagtgtttatgatgtataaatgaataacaatatagtttatgattgtaaatattatgtaaatataaaagttacttaaatggttttaggaaattgatattattgtgtctgggagattgtacttacttcaaaaagaggaggttatgacaagaaatgtgttgtttgacatttatacaagcagatattagaatgaaagaaagttaatttatatttctttgttttaagctaagaaggcgagctaggcaatttaaaatatattgaatggagaaaaactatgaataaaaacaacaatttagttattatatgtatgtttataggcatgatacttggaatggctataggttgtgctataggtatttctaaaggaaatgtgggtatcacaatgtgttatggtctaatttttggaatgataattggcatatgtatagggactgttatcaaaaattctaataaaaaagaataaatgaattttgatttactaggatgtttagttatgatttatttatgataaaactttttaattatctgtaaaaagtagaataagacatactaaataagatatactaatagatattttttatattatttttttaatatggaaagaatggaatttatatacactatatttaaatcacaaaaaataaaagttaattttgtttaggtggagatttttttgctcttatatattgaataatatcaagtaagtctgcatcttctaaaatacgatacttaatccaacctccattattgccacaagtataacgagtgacccagagttctttagcttttggtgtcaaagataccaacgttttttctactgctggaacttgcttgtcacctatctgaatcagaacagtaaatgcacctttttcaaaaaaagcataaaataaatgaaaagatttatggctatatttgtaaccccaaccataattgtttccaaaaggaaatcgaagttctcttgataaattatattgagtttccaagtaagtttccaacttacacaatcgtgcatatccatctttacctatatattctattatttgagacaaacagggtttattgcttttatcaagcatacgttcatacattataatttacctccatttttacttttaattatagcaaagtaattatgacaacagtatgtcaagtttttatgtcttattatactaacatgtaaaaatataaagtaattatttttagctaatagaaaaatatgatatttatatatattggaaaaaaatgtaaaataatgataaaatatagtttataatacaaaagtataattacattataattatatgtgtttagttggatttgtgtatttaaataatgtataatttatgctgattactgctaaaaaagcataataatattgtattgtaaggttttataaacttctaattgaaaggggataattcaaatggataagagatatttagaatccgatgtatttgaagcttttcaagaaagactttcttatctttttaatgaatttgattatatctatgtatcttttagtggaggaaaagatagtggcttactgctaaatttagttttggattataagagaaagaataatataagttccaaaataggagtatttcatcaagattttgaggctcaatatagtttgactactgaatatgttgaaaaagtatttgaagagaatattgaagatattgaaccatattgggtgtgtttaccaatggctacaagaactgctgtaggaaattatgaaatgtattggtatccatgggatgatgagaaagaagaattatgggtaagagaaatgccagtcaaagaatacataataaatcaaaaaaataatccttttacttattataagtataaaatgagacaagaaagtttggcaaagcaatttggtagatggattagagatatacatgaaggtgcaaaagttgtttgcttattaggaacacgagcagcagaatctctacaacgttattgttctattgtgaataaacagcatggatataaaggaaagtgctggataactaaggaatttaaaaatgtctggacggcatctcctatatatgattgggaaatagaagatatatggttagcccactataaatttgattatgactataataaaatttatgacttattctataaagctggagtagctccaagaaaaatgagagtggcatcaccttttaatgattcagcaaaagagagtttaaatttatacagaatattggacccagatgtatgggtgaaattggttgctagagtacaaggagttaattttacttctatttatggaaaaacaaaagctatgggatatcgtagtgttaaattgccatatggacacacatggaaaagtttcacatattttttgcttgataccttacctgaaaatataaggaatagctatattaaaaaattttcaacatctattgagttttggcagaatacaggtggtggtttgtcagaaatagttatacgtgaattgttgagaaaaggttataaaatagaattaaatggagtttcaaatcatacaaaagataaaaagagtagagtcatatttttggatgatatacctgatgatacggatgatattaaatttaccaaagatataccaagttggaaaagaatgtgttattgtattttaaaaaatgaccatatgtgtagatttatgggatttggtcctacaaaagaacagagaattagaacggaatatattaagaagaaatatgaaaaaattcattagataggagttaagatgctatggaatataaaagtcctgtatatggaatcatcgcagtgccaatcgaaaagatagaatctaacgactataatccaaatgcagtagccccaccagaaatgcagttgttgtataaaagtataaaagaagatgggtatacaatgccaattgtctgttattataatgaggaaaaggataagtatattattgtagatggttttcatagatatagagtaatgcttgaaaataaggatatatatgatagagaaaacggacttcttcctgtttcagtaattgataaatctcttgatgaaagaatggcaagtactattcgacacaatcgtgcaagaggttctcataatgtggatttaatgagtaaaattataactgaactttgtgaaattggaaaatctgatgaatggatatcaaagcacctgggtatggaagttgatgaaattcttagattgaagcaaataactggattagcttatttatttaaagataaagagtttggtaatgcatggattccctttggctctgatatagaagaagaaaattaaagagatttattaaaagaaaaagatatattaaaaagagaaaatttaaaatatatattgaaaataaagagctttaatattatatataagcacagaaaaaagagtaggaaaaatatcctattctttttttatttttataattatacttttagaataaataaaactatataaattaatgtattttaatataaatttatttgttaaaaatagtattaaattgtatatttatatcgtttttaataaaaaataatcacattttatttaaaaatgaataatatatagtaaatagtaattaagttataaaaaattgtataaactctatattatttatttaaaatagatatttatgaaagattaattaggaaaatttttataggtaaaataagaacaaaaaaagatacttatttaattatttaatcttattaaagacctattaaaactactgactataatatagaacaagtatacaatttttaaaaataatgctattttaaaattctaaaaattaaggaggataattaatgggatatttaaaagaggataaacaagactattgttgtgaatttgctagaccatacatcaatcgtcaaatttatgatgacacatacaatccaaaaacagcattaaaaagaggtactttatttcctgaattagatttaatagagtcaaataactataatgattggctatattcaaatcctaaaaatagagttagagctaaaaaagggggtaacatgtactaatgtcattaaatagaagagaacttttagagagaatttcagaatatcaatttgcctgtatagaattaaatttatatttagataacaatccaagggataagaaagctcttgatttatacaatagatactgcgataaatttacacaagctgtgtgtgattatgaatctaaatatggagcattaactaattttggatatgaatcaagtgaatatccttggtcatggatatctgaaccttggccatgggacaaatcattttataaataaaattattaagttttaaaattagaattattattaaatatatattaaggaggagtaagataatatgtggatttatcaaaaaacactggaacatccagttaacataagacaagcagaccctagaatggcaaaatatatcatgactcagttgggaggacctaatggtgagttggcagctgcaactagatatcttcaacaaagatatactatgccaactggaaaatctcgcgcacttttaactgatataggtacagaggaaatggcccatgttgagataatttcttcagtgttatatcaattaataggcagttgtactccggaagagcttaaggctgctggacttggtagtaattatgctaattttggacatggtcttcaaccagtagattctaatggagtaaactttactacaagttatattaatgtctttggcgattcggtaactgatttacatgaggatatggctgctgaacaaaaagcattggctacgtactatcaattaataaatttaactgatgaccctgatttgaaagatatattgagatttttgggtgagagggaagtagttcactatcaaagatttggtgaagcattaatggatgtttatgagtttacagagtgtaagcatcagttctaattaagtattaaaagtgaatagagagtaagcatcaattttaatgaagtattaaaaatgaaaagagaataagcatcatttttaatgaagtatcaaaaataaaaagagtgtaaatattagctctgataaactatcaaaataagaggtaaaggttttagttgatttcttttatctcttattttttattgattaaacagattactttgctatttaaatatattattttagcaaaaaaagtccaatcaaaagttcaaagtattaccatagttcaaagcattgccgttgttagtaagttttttacaatattttttatttactctttggataatcaaaagaaataaaaaatcatatctctttttttatatttctgtacacttttggagaatatcccgttttttctttaaaacatttactaaaatagattacttaatgaaaaacaacttttatatcaatatcacttattagctcatctgtaccctttagaaattcagttgcttttaataagcgaaactcagtaaaatatttcttgatgttatatcgatatttttttgtctatttagtgataaaattataatatacacttctataaaagttaatacagtaggaagcttaaatgtatgaattttatatccatcaaagggaaaggaaaaaaaggatgaacagattcaggtaaatataaaactaatatgatatgaggatagatattataacgaaagtgtagtcagaaggaaattatattagtatgtttttacataatggcagatagaaaagaagtgtctaatgatttgagtgaagttttcagaatataaggaggaattgtatgcaatatattagctattaccatagtccaattggaaatattcttttagcatcagataatgttgggttaactggtctttggtttgagaatcaaaagtattatgcttataatcttgaccaagaacatcaagaaaaagaattgccaattttcgagcagacaaagaaatggctagatatttatttttcgggagaagagcccaattttacaccatcactccatatggtaggtactcctttccagactacagtgtggaaaattttacaacaaataccatatggtaaaacaatcacttatggagaaattgcacataaagttgctcaacaaaaaggaatatctaaaatgtcagcacaagcaatcggtggtgcagtagggcataatggaatctctattattgttccatgtcatcgtgttgtaggaacaaatgggagtttgacagggtatgctggtggaattgatagaaaaataaaattgttatctttagaaaaagtatctgtgcaacattattttatcccaaagaaagggagtgcattataaagccattaaatttagaaattcttaatcatttatttgatatataaacatctaattttgaaagcaataacttgcaattttaaaaaactattctttaaactatatgttatacaaccttattcctagtaaacattatataactttagaggtagttttagagcttgtattttggaagtttattttcttttttcgtgtgagtagttatatgtttagatgcagtaatttatatgctacaaacaggaaaacaaggagcagacaaaaaatacttagataatatgttctttgtgaaaggttatgttgaagaacttctatttttagataacagttatgatattgtattttcatgtattgtatttcatcattgtacaaatgttcaaaatatattttgtatattttggaaatggtaagagtgttaaatataaggggaaaatttataatgattgatacttaagctactcattaagtattaagaaccatacaagataaggttgaaatttatatgcttcgttttatgtaaaaaatgtaagtgagttagaaataaaagaattatttataaaaaatagattaagtattggaaaatatgaaaaatagatgttgaacaaaacttagtcgattggttaaatttaaccaaacacttaaagtatcaaaagaaaaaattattactcttaagcaagaagatataaatggaaaaatgaaaacaagattttatccttttataagtgataaggggatatgttttaatcaaagatggacttttattttaggctgaaaaattatataactatattatagaatataagggagatacacaactttttagtgttcaatctcccttattttttattattatatcaagactcatttagtcgtgttaattttaggataaaatgagtattttttaataaattatttataagtaaagtgtgttgtcggataatcagtatttctgtataaaatttggtataactttaaagaagtatgtgaaattttcaggtattttttactatggtatattatttaactgattttaatttagcaatatcattccaattcttagatgtgactatctctatattgtttaaatcatttttaatatctgatgtatcttctactaatgaagaggtatgtttaatcactgtatctaatgtatttctgttaatttttacatctgacttaatttctgtaacatcactctgaattgtatcaagtctactactagtttcaacttgtccagtttttaagtctttaatatcaggttccatattgtctaatctactattgacttctttaatttcaccttgcatatcagtaatactgtcttgcatactattaatagtgccatccatactactgatactgccttgcatatcgctaatagtaccttcgatatcattgatattgctttgcatatcgctaatagtgccttcgataccattgatactgccttgcatatcgctaatagtgccttcgataccattgatactgccttgcatatcgctaatagtaccttgcatatcgctaatagtaccttgcatatagttaatattaccctgcatatagttaatattaccctgcatgccattaacagtaccttcgataccactgatactaccttgcatattactaatattaccttgtatttcctgtaataattctaatattttttcatccatcactatcacactcctgttttattattataacataatttaggtgttatattccacaaacgctatgtcatatttaatttttaatcatataattatctgctattcaaaacatggttaaatatatctatattgagaacttttttattaatgaatcttgtgtattgtctaagtgtctaagatactataataagtgtttttgaggcatatgtggttatatttgtatttaaaactgctggtaatatcataattgattacttgtgtttgaatattttgattagtagcttcctttttatttctttttattcttagttttaaactttcatatttccttgaaaatttattggcaatgaaagtgcatgaattttttagctattttttatgttacaatatgaatatataacaattcgacaaattggatttttgaaaggagtaaaatgttatgaaaatgccaaaagagagtattgatacgattatgtttgctccttgtggaatgaattgtatggtttgctataagcattgttatcacaaaaagccatgtgctggttgtttgaacagcgatacaggaaagccagaacactgccgtaagtgtaaaataaaggattgtgtctgtcaaaaagggttgttttattgttttgaatgtttcaattttccttgtaaactcataaaaaatcttgaaaaaagttataacaagagatatcaagcaagccttatggaaaatagtaaatttgttcagcagtacggtttagagaagtttatgcaaaagcagaaggagagatatacttgttctaaatgtggaggaattatatctattcatgatagggaatgtagcgagtgtcaagaaaaagtgaaatagctagatcactgtttatcaagatagaaaaaattgtaatatatatataaaggtggattatattgaggtggtatatagtgataggtttaaaatgtggtatggttaaattattggaacatcagatgatatgggataaaagtgcaaaagatgtcattatattattgaaaagtatatgggataagactgccattgatattcaacacattggaagcacttctattcccagtattagcgcaaagcctattattgatattgttgtaggtgttgcttctttagaggaagctaaattatacctcgaaaggttagagcaatgtggaatcgtttttcgaggtcaggatgtaccaaaacaattactttttgctatgggagattttgagaaaaatactcgtactcaccatattcatgttgttgaatggaatagtgtcgcatggaataattatatcaattttcgagattatctaaatacttttacagacaaagcaaaactctatgatagtcataaacaaaaattagcattacagtttgaggacaatcgtaaaatctatacacagagaaagcaagaactaataaatattttgctggaataagcacgactgtggagaataaatacctaaaagaataaatttacatttattgagaaattgaacaattattttcttatatttagtaaataaaaatctatttttgttgattaaaaaatatctgtacacactcatgactttagtcattggaggttcagattgtgtagaattattggatgaaggaggaacagtatgaaaaaggatacatctcatattatcaaacgggcagagcactttcaggtaattttgattggtgaaggacttatggttggggctgtggctggtttgattgtgcttttatacaggatacttttagggcaggctggtacttggcttagccaaattttaaaatttgtagaaggttctacaataaaaataatagcttggtttgcagtacttgcagtacttgcgtggattgtatcaaagttggtggactgggagccaatgatttctggaagtggtatccctcagcttgagggggaaatgacagggaaaataaaacaagtatggtggcgagtgttgcccacaaaatttattggaggattcttatcacttatgggtggtcttgctttgggaagggaaggtccttccattcagcttggtgctatggcaggtaaaggtatttctagagctcttgaccgagggaagacagaggaaaaattcctgttaacctgtggggcaagtgctggattatcagcagcctttcatgcaccactggcaggtgttatgttttcacttgaagaagtccataaaaacttttcagtatctgttttaatttctgtgatgacagcatctttgacagcagactatatttcagccaatttcctaggaatggagtctgtattccagtttgattaaaaaatagctacgcacacttgtgactttagtcatgagttagtagctaaaatagtcagcatatagggaaacctatatgtagagataggatagaacctatccaatactacttgaattgctggaaacccctaaagctaaccaaactaaaacataaggatgaaataaacctaagtgtgaaagttacgaaagtagaaaaaattggttagatggtataaggttaaatcctaagtactttaaaatgggcaatcagcaggtaaactccgaataggagaaacttcaacgactattcctcttgagggaagtacactacaagctattggtagtggaagtgggtagaccttagcggataatgccgaaggataagatatagtctgtgcttacatgaaagtgtaagaagttcataagagaactgcataggtagtagcgaacttatgtgaacgacaacctcaaaaatgataaaagttaagacttacggttcttaaatatgttatttaaaattaaatataaaaccttctaaataattgttttaaataattacatttgttaatattatgataggtgattaataaattgttcaccacagcattatataatatattaaatatgataaaatcattaaaaagtgtatcaaaaaacaattaaagtgaggtaatagcagtggaaaaagcttataagtttagaatgtatccaaataaaaaacagcaagagttaattaacaaaacttttggatgttgtagatttgtatataataagtatcttgctaaaagaatagaagtttataaaaacgataaagaaacttttacttataaacagtgtagttctgatttgaccaatttaaaaaaagaattaaagtggcttaaagaacctgacaaattttcactacaaaacgccttaaaagatttagataatgcatataaaaaattctttaaagaaaaagcaggatttcctaaatttaaatcaaagaaaattaatagattttcatataaaactaactttacaaatggaaatatcgtgtattgtggtcaacatataaaactacctaaacttggtatggttaagataagggataaacaagtacctcaaggtagaatacttaatgctactatatctaaagaaccaagtggtagatattatgtatcattatgttgtactgatgtagatattgaagcatttgaaaatactaataatcagataggtttagatttaggaattaaagaattttgtatctcaagttgtggagaatttatagaaaatcctaagtatcttaagaagtcattaaacaaacttgctaaattacaaagagaattatcgagaaagacaatcggtagtttaaatagaaataaagcaagattaaaagctgcaagacttcaagaacatatagctaatcaaagaaatgattttctacaaaaactatctactaaattaataaaagagaatgatattatttgcatagaagatttacaagtaaagaatatgattaaaaatcgtaaactatctcgctcaatttcagatgtatcatggtcagagtttattcgtcaattagaatacaaggctaattggtatggtagacaaattgtaaaggtaggtaaattctttgcaagttcacaaatatgcaataaatgtgggtataaaaacgaggaagtgaagaacttaaatataagagaatggatttgtcctagttgtaatgaaactcacgatagagatataaatgcaagtataaatatattaaaagaaggattaagactaataacaattcaaaataaataacttatgtaagaaccgtaggaactacggggatagcctgtggagaattagtaagacatattttagtatgcaaaattctatgaagcaggaaccctgtgactttagtcatgggaggttcagattggaaatgtgttgccacaagattattatggattaatagtgattttaggtgttattcttggagttatgggggcattttacaactggtttactctatatgtgcagtctttatacaagaagattcctaaaattgctacctttggaaaactgttgattccatttataatggctggtattcttgggattgttatgcctgatgttctggggagtggacacaatttagttgaagaacttacaagtcatgaatatatttttggaatggttgttttgatttttgttatacgttttatattttcggctgttagttttgggtcaggtgcaccagggggaatattttttccattgcttgttttaggagcatttataggtggaatatttggtatggtaggtgttaaagtttttggaatgaatcccgattatgtaaataactttgtgcttttggctatggcaggatattttacagctattgtgcgtgcccctttgactggtatcatattaatttttgaaatgacaggttctgttagtcaaatgctttcactatcagtaatttcaattgtggcatatattgtggctacacttatgaagtctaaacctatttatgaaagtcttcttgagaggttacttgaaaaaaatggagaacctgtacataaagagaggggcgaaaagatactagaccagttctctgttatgtttggctctcctgttgcgaacaaggcaattcaggatgtacagtggcctgaaaattgtcttttggtagcaattcaaagaggtggagaagaaattattcctagaggtaagacaattcttagaccaagtgatgtaattgtgactatgacagatgagagagatagtggtgctgtgtatgataagatggaaaatttgtgtaaagaacatacgtcacatattttttagggataatgatgaatgtttaataatgatagaatatttaatgaagatttgattaaaaaattggtaatttgaaagagagttaaggaattaatagaaaatgaaaatgtgatatcttagatgtaaaagagtttgaagaaaataattgtatatatttgttaatgagattatatggactaatggtatatttatactgtgctaaaagttgcactattgtatgaggaatgggaataaagggtttgaaaaaataggtagaagatttttcagatattcttattgggatattttaattaatatattttaattgcgatattttgggaagaatagaatttatttataaatgaaaataattaaaaggggttaaggttgtattagccccttttgcttatagagtttggaaatggtatcttgatagcagttgttttatgcttattatattttattacatattttaaaattaaccttatcactcctaaatcattattctatcaacttttaaaacactttcaagacaatcacctattgaaaacaaagttaattaaaaacctacatatcagtttagtattcgtgtagatgattatataaatataaaagtataagaaaggtgagtatctgtggttagttcatttttaaatgatatctttagaacaattttagtaagttgtatttttatagttattttattagtctttagaataactttatttaagactttcagtaaaaaatttaattactatatatggcttattgtgattattaagctatcattaccatttatgaattatacttttatatttaatgagtcaaaatataatggtaatattaataagataagtttaggcaattttaatagtatttctattgtatatagtactgttttagtctctgtttggattgctattacgatattttatttagtttatactttattgaaatatattaagcttaaaaatatgataaatgatttgtcttatgatgttgaggatgataagataaaaaatctttatgaaaatttattaaaagagcttaagataaataaaaaaatacggcttaaatattcatatgaagttgaaagtccagtattttttaattcgtgtgtcattttaccaccatgtgattatacattaaaagagttaaactggatatttaggcatgagttgatgcattttaagagtaaagacctttacattaagtatttggtgatatttttaaaatgtgtttattggtttaatccttttgtgtatataatggagaagtttatagatttggattgtgaattttattgtgatgaaagagttttgaagaattgtacgatagaagagaagcaggattatgcattgacaataattagtgcaatgagaaaaggttcaaatagttcaaataaatttgtggctggattacataaggagtcagatattaaaaaaagagtgtttagtatgtttaatgaaaagtacagaaatggtattttgatagcagttattttatgtttattatcttctattacatattttgaaattgatttaattactactaaatcaatattttatccactttcaaaacaaacacctattgaaaatagaactaattcaaaacctacatatcagattaatgtttatatagataattaaaaaatacaaagtttaacaagagattaatataaataattttaataagtatctttcacatatgttaaatttactttaattatattaaagccaatgaattattctttagaagctccaatgccagtaaatacaggtaaagaaaaatcttttactacaattgtaaattaaaaaatattctaatatttaaagaaatgcaaaagtgtaagaagggtaaaaatctgttataatacattaaaaactaaatttagaaaaatttacataattagaaaaatgatttgataaaaaataaagttaaatattaactaagtaaatttgaaaaagaaaaaatataaagtacaaatttaaaaggaggtaactaatgaaaaagaagttggaagatatgactttagaggagttatggaacttgtttcctatatttttgactactcacaaagaatgttggaaaaattggtttaaagaagaacaatatagactaactggaatattgccaatgcaaaaaattgttagaataagtcatattggaagtacttctgtgagtacgatttatgccaagtccattgttgacatactgattgagataattcctgattataatatgaaagatattaaagatttgattgagtcgaatggatatatttgtatgtctgagagcagtagtaggctttcacttaataaagggtatacagtagatgggtttgaagaacgcgtttttcatttgcatataaggtatgtaggtgataatgatgagttgttttttagagattacttaattgaccacccagatgttgcaaaggagtatgaaaaacttaagttggacctttggaagaagtatgagcataatcgtgatgcttatacagatagtaaactagattttgttagggagtttactgaaaaggcaaaggtgttgtattctaatagatataattagaaataggtacaattagatatttatcttatatatcgtattatattttttaagaaagtaattaatagaaaaaggggttgtttcaaaatggagagataaatccctttttcattgttgaaatgataaaaatatatttgatttcatgtaaaaaagagtgcctcatcaactaaaaagtttattttgagacacacacatttttattaaggtaaataaaaatatcacatttgattaaattttaagttaatgaatatatgtgtaaatatttaattataagttattataattttacatagtataaaacaatctaatttgtattatataagataatctaattttagactaaaataatctaatataaagaaatagagaaaattcattctcagtataagagatatccaattttccattgtacttattaacaatttctctaatattctcaataccatatccgtgagaattactatcttttttatctgaaataaatagttcttgttttctattgataggatttaccttgttgtttgtcaataaatagctaaaatactccttctcacaacgtgcctttaataccacttttctatttgacaaatcaggaattttcaaagatgcttctatagcgttatctaaagaatttgaaaaaatagtacataaatctataggttctatacccaagtgattgtctatatctatattaaagtgcacatcaacaccattttcttccaaacttgtatgacgaagatttaaaattgagttaagagcttggtttttgcaaaattgtttgccactaagagtacctatacctatttttaactgattaaaatactttttagctccagcaatatcttcaatttctaaatacgattcaatcatttgaaagtgattattcatatcatgtcgcattttgcgtatttgaatttgttgattttctagtaagttatagtatttttcttttaggtgatttgcttgtttttctatcttcatctttacattttcaatcaatggctgtaaaagaagtatcacaccgatatttgccagaattgctgacaagatgattagataagtgccataaggtaagttgcctaagataatattcttattactacccatagggattaaattagtaggtggcagaataatagcaattaatattgataaaaatgaagatatacataccatatcaataaaaatccatattttatttgataagtattgttttatattgaccaatctattctttaggaaaatatgtattaaaaaccaaaataataatttaattagagcagaaattatctggactattgaaagtattaaaatatattcttttgagtgtataagttcctcatatatagggttgtttataaaaagaaaattaagcccaattataataggataaagtatcatgacaactgatattataggaattaatttgcttttgctacatattataagtagtataaaatatccgaatagtgtaaacaaaatatttacggggtcggaaagccatattatcatttgactaataatagagtagcccaaaatcaatatgattttgaaaatccaatgattcctaaagtctataaaataggaagtcaacttataaagaaaaaaggctatgaaaatattgattaatattagaataaaatttatgcttgtagagattaaagaataagtgtccatttaatatacctttctattaattaagattctggaaactaagttttaaaaaattaaatcttaaaaattaaaattctggaaattagatttcaaagaattgattttgaaaaataaaattctagaaattaagcttcaaaaaattgagttttgaaagattgaaattttaaaaattaagtttcaaaaaattaaatttgaaacaaaactctaaaaactaagcttcaaaaaattaaattttgaaagattgaaattctagaaactaagctttaaaaaattaagtttcaaaaaaactctaaaaactaagcttcaaaaaattaaattttgaaagattgaaattctagaaattaagcttcaaaaaattaaatttgaaaaaacaaaactctaaaaactgagctttaaaaaattaagtttcaaaaataaaattctagagattgaacttcaaaaattaaggttctaacatataccttgtaaattttcctacaacctcttgatattttttacggcttataggaattttttcattctgaactttggcataagtttgagttatactatctacatggtttagattgacaatatacctttgatgcgtacgtataaaattagagggaagaacagtttccatatcatttaattttccgtagtattctaatgttttatcaaaggtaactacagttaattttcttagctcgcttttaaagtagaggatatcttttgtattaattttacaaagattagttccaatatgaactgtaataaagttttctttccattgttctaatttttttagtgcttcttttaatactttacatattttttcagttttataaggttttaagatgtagttcaaagctcctacatcatacccatgaaatacatagtcagaaaaacctgtgacaaagatgattatagtatcttttgaatgttttcgtatagtttttgctatgtcaacgccattacttttttcaagttcaatatctaaaaaaataatatctatgtaataattttcgtgttctagattgtatactagactttctccatttgaatattcttttatttggtaggggtagccccacaaatccatttctcttgtaatgattttattcagcatgtttctttgttgtttttcatcatcacaaatacaaatcgaagtcaattttttatctcctttcaagttttatatttatatagttaagtatataatatattttgctacctagatatataaaatgaaataacaattatatccagatagcaaaataaaattttttatattagtatacttacacttaaaactattctattaaacttattctgaagtgctaatgattttcttattaaaaaatctaataacctttcttattataaaataccaatgcttttattattataaaaatgtaatgacttttcatattataaaaagcaaatgattatcttactataaaaatacaatgacttttaatactataaaaagcaaataattatcttactataaaaatgcaatgacttttaatactataaaaagcaaataattatcttactataaaaatacaatgacttttcatattataaaaagcaaataattatcttactataaaaatataatggattttcatattataaaaagcaaataattatcttactataaaaatacaatgacttttcatatcataaaaatctaataaccttttttaatttaaaatgctaatgcttttcttattataaaaagtaatgattttattactttaaaaatctaacaaccttccttattataaaataccaataatttttttgaatttcttataagttaatagatatataaggtacatataaactccacaaatccctataaaacctaagtttatcaaaagagcattgacctcactattgacgattctaccatcattatttaacataatcataaaattaaacagataaattaaaaaacttcctgcaataagagggtatgaaaatactttctttaattgatttctaatacagaactttatataatcattgtttgctcctaatcgatttaaatccataaagacctgcttgtgatttatagctatagtaacaccccttgtatatgcaatgattcctactgctgtaaaacatatgattgccacatatatgaataacattaagaagactgccatgttttttatcatatcttggctttgtaaaattttaaagttaggatagtatttccaattaagatacaactgattgttgtttgggtctagttttaaatgaccttcaccacttggatattcttcatccataaaatattttcttccagttgattcataacgtttttttacgtattcatcataaccactgaacatgcccatttccttagatgttctttttataatttctttctttaagtcattggcaaaagcataggtatctttatctacattaaatagtatagaattattgtaattttttatggataaatctttagtaaatgatttataatcctcatcattaaggacataggcgttcatacttctattttgaaaaaaagaaccattaaatattatttttccagcatatctaaaggggatttctttttctgtgactgggcttgatataaatttggtatatttataatcttgattttcatttcctttatttacaacagcaagatattcaccattttttatagttattggtttgtcaattagcttggaaaaatctttagaattaaagaacatatcataggagctttttttcatatataccctttcgatagttccatctttatgatatattgattctacaccatcaacaattaattctatagaaggaatttccatatagttttgaatttttatattgtgtttatctgctaattgttcaatatctttttttgatacctgtttatctctttgattgtaggtaaaagtataatctatagggttatttttaagagtatcatagatacctgcaaccatattaggaacatagaatacagcaaataatgctcctgcaatcaaaaatgaaataacacacatgttttttactgtttgtcttcccataaatctcatcatgctagttgatatgatgtttttatagtatttttctggatgttttcctcttttagcatgtacaactatgtatgtcataatcatatatattccaataagagagagtagataagtaaagctccatacagatggtagtctataatttaatttgtttatagttagtgaaggtacgatatatcctagaaaaatacctagtataataaaaattatacctaatataccataccagtcctttacatcctgtattggttcagatattctctggtcatttaatatatcaattatatttgtacgattaataaattttacagaaagtataaatatgcataatgtcacaaatacactaaatataaatccatatatgaatccttgagttccaaaatgatatgtcatttctctggtatcaataatcactaattgaaatattttccatataccaaaagatacaggaatacttaatataagacctaaaaaacagcatactattgaaattaacaatatctctgaaaatagaagtttttttaatttcttcttatctgttcctagagccatgaaaataccaatttccttgcttttaaattttaaaaagagggaagaagcgtatgtagtaaagacagcgcatcctaatatagcaactgagaatatcattgtagcctgttttctgctatctccaccagttggaagtatgttttgtattgttgggctaaaataaattagagcatatgaagttactaataccacagaaagtattatacaaaagaataaagttgtatagttcttccaattataggctcgaagtttgctgtataatttattaattgtcatcttgagcgcctcccatttcttttaaaacttctagtaattcatctaggaatttatgtcttgaatttgattttacaacttctttataaattattccatctttaagcacaataactcggtcgcagaagcttgctgcaaagctatcgtgtgtaaccatgagtatagtagcatctaattcttgctttgcttttaaaaatgattcaatgactgtacgacaagacttactatcaaggttaccagttggttcatctgctaatattaaatctgggttgttcatgagtgctcttgctactgctgtacgctgtttttctccaccagatatttcggcagggtatttttttctgatatgttcaataccaaatagctcgcatagattaattgcacggttttccatttgtaagacttgactacctttgataatttgtggaacacatatattttcaaagacactaagaccatcaaatagcatgaaatcttggaatacaaatcctagttgttggtttctaacttctgaaagttccttttcttttaaatttcttatattattatttccaagaattatttccccattatcaattgggataaaacatgaaatacaatttaaaagagtagtttttccacttcctgatgaacccatgattgcgacaaactctcctttgttgatttcaaaagaaatattttttaatacaggatatgttttattgcctgttttatatgatttacataattggtttactttaagcatatatatcatcctcactttcatttatcttgtaagtcaatgatagcatttgaaaggggaggagggatatgagcaatattgtaatagttggatgtttttttgtaatgtttgaaaatatattgtttggatagtgtgagaggttattattatagttaaattgattatattattggaggatttagagggttatttttaggtattaattgttgtgctaaagtaatatgatgtggaacattgaaggtgtagttagaaaaaaggtatatagtaaaagtaaaaaggttatagaataacgaatgttgtattgaaaaaaatgatgtaaataatgtatagtagggttaaaaagaaaaaaagaattatagagcagtaagattatttaatggaatgtattgtaaataatttgaaaggatttaggggttattaacacaatgtaattgagaaaatatattggagttttggaaataaataggtcgttaaaaacaattgaaatgtataataaaaaggttaaaaagtattattagtataggtatgatagataattttagaaagtggaagtattttagactatgctgaaaagtgattgatatgattttgagatattaaaatattactatattatagtaaagacgttaaaataataaaatgttgtaataataaaggtttgtagtataataaagaactgtaataaataagactttgcaatgtaatagaaatgctgtaataataaaagtctgtagtataataaagaactgtaataaataagagattgtaatataatagaaatgttgtaataataaaagtctgtagtataataaagaactgtaataaataagactttgcaatgtaatagaaatgttgcaataataaaggtctgtagtatagcaaagaactgtaataaataagagattgtaatagaaatgctgtaataataaaagtctgtagtataacaaagaactgtaataaataagactttataatataatagaaatgttgcaataacaaaacaccataataaataagagtttgcaatataatagaaatactgtaataacaaaacactgcaataaataagagattgtaatataataaaagtctgtaatataacaaaatcctataataaataagattttacaatataataaaaatcctataataaataggactctgtaatataataaaatgctgtaataacaaaacactataataaataagaccctgtaatataataaaaatactataatatagtaaaaatcatgcaataataaaaatctataataataaaccccagcataacaaagacattaatttcttactaaaaaggccaccacaattaacagtgaaaaagcaattgaaagtattgaaaaagtaaagtgagaattagagtcattattacgattattaagttttatccataaaccacatataattgtacacaacaataaaattgctgatattactcctataaatgtaaaaaacattaaaattcctcccccttatttaatgcaagtatttttagtcaatgagaatattttcaaacgttaccataaaataaaaaaatgtacataaaaaattaatatagtattattttgtaatatctaccaataataaatctaattgaaaatctattaaaccatttctctgttcaacattaagaatatcaataccactatacttgaaaaaagcattagaacgaagaaaaagcaactgaataaatgaagttatttgatacgcaatagttctgtattcagcttcagtttttttgttattctgattttcatagtgagccttaattaaaggtagtatctcaaatggataaacaatttcttcttgtatcaatatatagggtacagaaatctttataaattggctatgttcacctataaaatcaaaaaatgcaattagtatttcccttaattgctgtttaggtgctaaatttttagtatcatgtgtagccttatattcatccatatgacgctttaaaaattttttaatagaaatattaattaactcctctttagatttaaaataataattaatcatagctaaattgacatttgctttagctacaatttctctagccgtaatgcttgaaacatctctatgtgaagatagtaactggattgtggcattaattaattgttcctttgttgaatctgctttcataatttttccccttaaaagtttctccataaaaaaattaaacatgtttaatacacgtttagatactatcatgaaaattttgggatgtcaatgggtgattagtacttaagtatttaagtactaatcgattagacttttataagggggatttgaatttctgtaagataattttcaggatttatttcattatgctcacccttatgaccgatttgtctatttatacctgatatttgataatcactatttttatctaaccaataacagaacgattcatatgcaccagctatattttcatatggaccataaaccatagtacatgccatcatatcaatttcttctgtctcacgatatataaatccagatttgttctttccaatcttctttacaaccattccaacttcaatatctacaccattatctttgacttcttcatcatggtaaaaagctatattattgttgggttgacgtgatacttctatatgttcttctttaataaatttagataacttttcccagagtataccttcagattggtagtctgggactacctctctaagtgatatgattttataacttggaatctttttaaagacaacattgtaatgaatttcatctttatcacagtttatagcttctataaatttatcaattttatttattctttgttgttcgtgctttatttccttttgtatttcattcttttttctattcaattctttaattacaaattcatcattccaattatgtacgatatttgctatttctgcaacgctaaattttgaatctctcaataatacaattctttgtaatattgaaatctgttcaactgagtataatctatgacctgtatatttgtctatttctgcaggctttaaaataccaagttcatcataataacgcaacatacgaatagaaatttgtgttagttttgaaacctctcctattttaaacatgaaaatatgacctccttttcacttataattagtatatattttgtttttatatacttcaagcgattgtggaaatacaattattttccagatgttgcaataaattatagagagtaaattatatttaagtagtaatcgtatcaaatcatagattatcttaatttataattcatattaaaattaccagtctaactcaaattcaaaatcatccgactttatctgttcaatttcagaatttaccttctgtttaaatttattagaagaaatcatatatacaagaaatattaaaccaaatattatttgtacatattgagctattacacataatttaatagggtagtgtagaagtaattgaatgttgaaaaaatagtacatcatatgaactaacccagctgataaaatgcttctacttgtattgatatatacaaaattaattataaagtttaaaagtacaatgtttggtataaataaaaaagcatcaaatagggagtattgtgccaaattatatggtatttgattaggtgtaaaatacgaccctagataccagattccacaaacaagccctaaaataattgaagagcctataaatccaaatctaactaataatttgtcaatggcgtatcctctccatccagcttcttgactaagtatactcaatataaaacttgctaatagcatataagctattttagaaggtctaaacactgctatgtgtatccaatctatatcagaagtttttacattaaagtaatttccgattattaacgaagtaataaaagttaaagcaaaaaataatattgttaatagtatccattttattctaatttctttaaagcttaggtatctataaataaaatcttgttttgcactttgtggatagattgtagaaataaaaaatagacctacaatagctggtgatgtatatgcaagataaaaaatgatttctccaagtattgtatttgtaattccgagcaacgcaggtgtaagactgaatatccagttcaatactagcgtagatgtaaagaaatagattaagtgtttgtttgtattaaagggggtgttatatagttgcattttttcactatccttccgttttataatgaagttttaatttttattaattgtttatttatttttatatgtattaagttatcgtttgatgttagttattgcctataataatatcctattttttatattttgattaattatttttacactaaatataattaattagtatttaatattgaacatattatattattattaattattaaataggtcaataaatttgcaattagtgatattaataaattactttagatttttattaaatgtttagcttttctttaatattttttatataacgacgatttataataactttttcgttgttttttaaagtagcttgcatgcgattatgtgatattacttttatactttttatgtagtccatatttaaaatcatggatttagatattcgtgagaaggatgtattagctaataattttgataatttatatatttttaaatcaatttcaaatacatcatcttcataataagcaaatgttttatttccaactgtttcaaagtataaaatatcacagacattgagtttataaatctctcctgattttttaccttttatatcaagtaatggtgtactcaataatgaaattattttttcaatgttattatctagagcagaacattttatggttatttcaatatcatcacaattaataccttgttcgacatgtattttcattaatcatcacctcattttattactgtcattagaatagcattatatcttattgagtccaactagatgcgttctaaatttcaaattaagcatagtgaaattcaaaaataaaatagtgaaattcaaatttgaggtggtaaaattcaaaaaaatactatggatatttggataaattatccaaatatcctagtatttagcatagaatatgtctaattattttacaaatagacctattttatgacttacatatattgtcaaattacttcttaaatatcaaaatatttttggataatgtatcaatactgtttgataaagtatttaatttaccctcaattctaaccaacaagtacatggatagagctataggaaaaccaacattggttattaacagttgtaaactatcatccataaaattagccccctattctataactaagtcataaggagtggtatttgtttccacaaccttggcttcaacaacagaagctaggtcaaatcctccaaccgaaaaaatatttttagatactatcaaatccatgacagattttatattttcttcagttaaatcatcctttggattttctatagaaaaagaaacttgtttatcctttacatttttaaagctcatgactaattttttcttaatttccatataattacctccgatataataatttatattttaattgtttgcttgttaatattggtattttaattgtcaatattagtgttttgcttgttagtattaatatttcaattgtcaatattaatgttttacttgttagtattagtatttcaattgtcaatattagtgttttgcttgttagtattaatatttcaattgtcaatattagtgttttgcttgttagtattaatatttcaattgtcaatattagtgttttgcttgttagtattagtatttcaattgtcaatattagtgttttgcttgttagtattagtatttcaattgtcaatattagtgttttgtttgttagtatcagtgtttcaattgtcaatattagtgttttgtttgttagtatcagtgtttcaattgtcaatattagtattttaattgttgactctagttattgctgatatagaaaatatttaatttatttcaattaattagattaaagtagggtagcatttaaaatagctaacatgtttaagttgaaatacgtttaatatattaatttttcaaagcattaatatattaaagttataaccaaaattgaagttataatctgccaaatctatagcgtattaagtgcgttatataacttaatcttttatataaagagttaatttttttaatttgtaaagcagagtacgtttaaaagatactatttagataatgatgtactatctaattttaaaatatctacaatagggttctcttgaagacttgctattgcttctgcaacagcataaacatcttcatttaatgcctctgcttttacatttgcaaatgatttacttttaacaactgccttacccttatcatcaaaaccagcatccaattttagttttatactagataaattttttgttgaaacaacttccataaaattacctcctaaaaatttaatttcaaagatttgtcgactttctttgttagctataatactatcatctaagataatatcggagttaaacagtaatttctaaagattttttgtgtaaatttttataggaaaaattttacttttctgatgatgaaaaagtttacaagttatttttgaagatatgttcttagtgttttgaaatagtatttgtatatattcatgcttagttgagatagttttgtatggattttcatatgtgtagagttaaatgttaggtaccaaagtttatgttaaattaaatgttaaagcttatgttaaaaattttattaaatttaatctgtaaataaaaaagttaaaagtccaatattaacattttacttttaaaccattaaaatctttattaaagctaacaaagttataagttatgagaaattttattaaagttaatacaaaaattaattttaaagctaagaaattttttattagattcaataaaactaataaatatagtttagtcaataatgtattaaataaaaactttgttaagtctataaaaatatcttaaaggaggtgtaacttatgaagataaaagtggaggatataccagttcaatttcatgcaatggtagaaataatcggaattgataagttcatagaggttgccaagttgtatggaggaacaaatacttatatacctacgtataaggggctttttagatatgctagaaatagggatatagtaaaacaatttaatggagtcaaccataatgaattggctattagatataatatgtgtgtaagcaatattaagcgaatactcaatgaaaataatgtttaaacataatgaaaatagccttgttaaatgtaagagtaaagacaaagaagatgttttataaagtttttttagacaaattaactaaatttactacttattaatttaaatacattgtatattctataaaaaaatttgttaaatactggagatatattgagaatacaaagaaaatggtcgaaaatatttgttggctaaaaaatagataaaatgatacaattgcttgtataaaggggaaaaataaataaataaactatataaataaagaaatagcaattaatatgacataatatatttataaaattaagaatataaatagatattttaagggattagttgttaaattaggaaatattaaaaaaatatatatatttatatttaaactattttgttatttatataaaaatacttatctagttactagcaattattagtagaaatgggggaaatagagatgaataagggattttacaaattaaattcagtggtattgaactttgatattaagaatgatgttaacaagataagatttaatcattatataatgagaaaagaaaacatacaaagacttcaaggaactctgccaaacggacaattttatatgacagtgagaagagctgctacagatttacaactttctatttctactataagtaggcttgtaaaagagtttttggatttagggataataagattagtgtctaagggtgtaaaaggtaatcgttctgtatatagttacgtaagtatagagtttaatggaagtttatttgatgatagcaaatatatggaacttgactgtgtatgtaatgatgaatttattgataatagtggcatagagtttgattgtgatagcaaagataattcttttaatggagatataaatgtagaaactgtgcattgcattaatgagtatttctctgatgatgatgtagagcataattataacaatttccataataaagatactataaaggataaagccatttctaatattagcactatcaaaaaatatattgatgaatcttttgatacaaataaatcagaaaattctaacttacaacaggagtcaataaatttcaactttaatgatacatgcaatgaaatagataaaagaacgaataatagtatagaaaataatcaaaataaaaggcctatgagattgagtgacatcagtgttttaagtgataaaggtatgacaaataaaaagaattactttaatcataatcatggtatacaaaaaaggaataaatctgcaacaaagaaaaaagaatccttaaataaatttaataaaaaaaatatacagcaaagcattataaatatgctaaataaaaaatcaggtaagaattttaaaatcgattctccaataagcataaaacttatcaatgaaaggctaaaggagggctatgtcttagaagatttctataaagttattgaggtaaaagtggctaagtggaaaaataccataatggaaatgtatataagaccagaaaccttgtttagctataagtttgaatcctatgtaaatgaaaacatatctatgaaaagtcaaagtaatgttcatccatgtaaagaaggcaatagtaatgatagcagtaattatatacattctgattatacaacatatgatggcagtgtgcgtgagagaaaaaaatatgagaatgtaagatactggaatcctatatgtgaaatttaattagtttaagaatgtatttatgataaataagatattaatagagaatagtgagctatagcaaatgatatatcaatagttggtagtaagttatattaagcaagatattactatcaggtagtgaattatagtgaacgatatatcaataattggtagtaagttatatcaaataagatattactatcgagtaatgaattatagtgaacgatatattaataattggcagtaagttatatcaaataagatattactatcgagtaatgaattatagtgaacgatatattaataattggcagtaagttatatcaaataagatattactatcgagtaatgaattatagtgaacgatatattaataattggcagtaagttatattaagtaagatattactatcaggtagtgaattatattgaacgatatatcaataattggcagtaagttatatcaaataagatattactatcgagtaatgaattatattgaacaatgtattaataattggtagtaagttatatcaaataagatattgctattatgtagtaaattatatgtatcagaataaatagtatattaataatttgtagtatatcatgacgaataatatagtcataacaaatagtgagtcataacaaataatgtatttataattgataatgtatttaaaaatcaaaatataaaaacttataaggaaagagagattaatttatatgggtaaatcaaaagatgttgaaatagagaagtctattttaggcacaattcttttagacaataaattaagctataagctagatgaattaaatgaaaacatgtttatgaatgatatatgtcttgagatatttaaaattatgaaagaacttaaaaaagaaaacatagtgattgatgtggccactgtgaaatcaaagatagatagaaaatctctagcaataaaaacgagtgatgtgactaatctaattacttggggtcagaattttggtcttgatggtcatattaaaattttaaaagaaaatttagctagaagaagcataaatcaaaactgccaaaaccttttacacagcctaaaccttggagaaaatatcgatacttgtatttacaaatttgaaagtaatataaaggagattttggacaaggatacttatgaaaatgatgatgtaaatagtatagcagggaaggtgcttgattttttagaaaacaaaaaagatattggatttaaatttggtataaaattacttgatactactataggaggtctttttaaaggagagctaaccacaatagcagctaaatcgggggttgggaaaactgctttggcacttcaaataatgttaaattcatttaagcaaggtaaaaaaactttatttataagtagagaaatgaccagtgagcaagtatttatgagaaatatatgcagagtaactggtgtaagtacaaggaatatgaaatctaaagaaatagatgaaaatgattggaaacttattgtaaatgctataggtgatttaagcgaaaataacttaatttatattaatgataagatagatacaattagtgcaattagaaagaggataaggcaggtaaagccagatttattaatagtggattatgtgcaactccttacatctcagaaaagcatggataagagagaaagggaggtagctactttttcgagagaacttaaaaatatgactttagattttaatatacctgtaatccaattaagtcagttaaatgatgaaatgaaagattcaagaccttatggagatagacctatgagggatagcaaagccatctaccacgatagcaacaatgtggtttatatacatcaattaaaggggagtgattatgaagaagcagtgagagatattggagaaagtgaggaggcagttagagcatcagaatacaggggaattaagatggttgatttaatagttgcgaagtgtagagatggacagactaggcataagcatttttgttactttggggataagttacattttcaagaactaaattattaggtcaataaagtagtaataacaagcttattaaaagtcaggaaatagcaaatagattataaaatatgaggtgaaaatatgttggaattaacgaaaattatagaattacttgaagaacacaagatagaagtaagtattccaaaggagttacataagtatagtttattggaataccttgaattgtgtcaacaaagtgggggaacatatttttatattaaaacactggaaggggcattaaaagaggctagaaatgagcttatgattaaattgtttaatgggaaaaattatatggaattagcgaggatgtttgaaatgagtgttattaatgtcaggcatattgttagaaaaaaatagatatttttggagaatacaagtgtgatatacttctgaaatagaagttattatagttgaaataaaattgtggctaatttgtgtataagtttaagattatagaggagtataagtgtgattaacagcatgattttgtgaataaaattgatgatatatatgagttaaatgtgtgattaataaggtaaggttgtgtataagattatgagtatttaaaaggaggggctataattaatagtgtagagttgtatgtttgcttaagattatataataatttaatagattaaactatacgaataaggtaaaatcgtgtgtttagttaaagcttattataaaatcttgatatgcgattaatgatgtaatatgtgaataaagttaagattataatagatttaacctgtggctaatagaataaaattgtgaataaagttaagattataataggtttaacctgtgattaatagagtaagagtgtaaatagagataaacttcaatgtgggtttaacttgtggttaatagagtaaggtgtaactaaagataaacttcaatatgggtttaacttgtgattaatagagtaaggtgcaactaaagataaacttcaatatgagcttaacctatgattgatagagtaagaatgtaaatagagataaacttcaatatgggcttaacttgtggttaatagagtaagagtgtaaatagagataaacttcaatatgggtttaacttgtggttaatagagtaagaatgtaaatagagataaacttcaatatgagcttaacttgtgattaatagagtaagagtgtaaatagagataaacttcaatatgagtttaacttgtggttaatagagtaagagtgtaaatagagataaacttcaatatgagcttaacttgtgattaatagagtaagagtgtaaatagagataaacttcaatatgggcttaacttgtgattaatagagtaagagtgtaactaaagataaacttcaatatgagtttaacttgtggctaatagaataagattgtgaataaagttatagttttagatgggtattaacctgttactaatagaatatgattaggtgtaaaattatagagctgtataagaaaatattatagatatattaaatattagataataaatatttatatagatacacaaaagaaaaggcgatatgaagctaaacttaatgacttcatatcgttttttatttgaaactcctttgtatttagagtgtgatttttaatattgaggttttatgtgattaagtcacagataaaaagtaagtatcttgatataattcttatagattaataatatagggaggttattatgtctaataaaaaaaagaagtatgcaaatattttagcaaatgagtgcgttgcttgtggtagctgtataaaagcatgtccaagaagtgctatctcagttccatgtggcattagtgcaaaaattaatagagatttatgtgttggatgtgggatttgtgaaaagatatgtccagcatctgtaattgagattataacaatattaaaagaggaagaaggtaagtgtcatgaataataaaaaacattggtatgactatttatggattttttcttcaatatatttggtattgggatttgtaaatattattttcgcttggattgggctaatttgtttctttgttccactagctatttctattgttaagggaaataaagcttactgtaataagtattgtggaagagggcaactgtttaatttgcttggaaataaattgaagctgtcaagaaatagagatattcctaaatttattagaagtaagtggtttagatatgggtttttgacattttttatggtaatgtttgccaatatgcttttttcaacttatttagtgtttgaaggaagtagaaattttaaagaagtagtgactttgttgtggactataaaaatgccttggcaatgggcgtatcatggaactttagtttcaccttgggtggtacagtttgcatttggtttttatagtgttatgcttacatcaactgttcttggtttgattactatgatattgtttaaacctcgttcatggtgtgtttattgccctatgggtactatgactcagatgatatgtaaggcaaagagtaagtctgtataggaagagattttgtgaagatttaaggggtttaatgtttaaagctagagttgatttaagaaaataagaaagatataaatatctaaatatgaaatagattcaagatgagtaatagtttctattagctatgataggtatatgagtggagcataaatgaagtttgtataaagtaaactcatttatgcttcttttttacatgatacattactaattaaatagaaaaacaatgtaacaacttgtattttaagtacgtcagagaaatctgaagaaatgataaatgttatagaagattgtaaacttatgcttaaaacaagtaatagatatttaaaggaagcagattaaatttcaagaagtcttacgtgcttgttgaaacataaactggatttgttacagataaactaatttatacaatattttttaattaatatgttttcattactatatattatatgttaatacataaaaaaatggtggctgttttattaaaggtaggtcaatgacatttcttataaaaataaattctaactttaaattaacttaggagttctgtataataattatatgttgaaaatattatgaagttttgcttatacaataaataattgattttatttctggtaaaggtgatagaaaaataaatattcagattatatagtaaatttaactatatatattaaactataaaaaggagattttatatgatgaaacgagatatttactcagtacagttagattatatgttagcataatgtactgagtaaaataataatttgctaacaaatagaactgtactgctaaaaactttaggttttgttaacttgaaatgattaataatcacactaaatttaaacaaataaagaaacattttatctataaaattattttaagttaataaagtaaaataaataaggataggtgtacagttatgaaatatttaatagaaatagcaaaaaaagagaggttattagtttttatatatttagcactaggtataggaatagaacttttaaatagttttagtgctaattattatcagagcctaatagatagatttaataacagtactataaattttcacataatttttatctatggaactgtattagttactttatgtcttttaagatatattgatgaatatccaggtagaagactagaacatagtttttttttagatttgaaattaaaggctttagaaaaaatgagtaaaatagattacttagaatatcagatgttaggcactggaaaattaattcaaaaaattgaaaatggagctaatgctggcagaaatatattttttaattttttattagccgttgttagaaaaataattccatcaattttatttagtatggtttttatttatagaattgataaaaaagttatgtttaccatattaattggatattttatagtttttattattactaatttactaataaaagctctatatcaaatcaaagagcatatattaattaatgaagagaagatgaatcattttttagttcgtggatttgtagaaatggttgtatttcgggtaaacaaaagatttgagtatgaaatttgtcagtcaaaatttgcgaaaaaagaaattattgattctagggttaaaatgacactgattcatgaagctttcttcacgattttttcattaatagtgacgttcataaaaatgttaataatagtttatagttggaaaactaaaacaataagtataggttctataattgcattgataactttactagataatgcatatactcctatagctatttttaatgtattgtatattcaatttaaactagataaagcagcatataaacgctatacagatattttggaacttaataatgatggtcaactgttagcaggtaaagaagttaatttaatgtatggaaatattgaatttaatgagattagcttcttgtataataataagcgagagatatttaataaacttagtttaagtattaaaagtggagaaaaagtagctattgttggagagagtggttctggtaaatcaactttaattaaactattaattggattattaaagcccagcgaaggaactatatttatagatgattataatctacttgagatgaatctaaatagttactataattatgttacatatgtgtcacaggattcacctatatttgatggaactttacgtgagaatattgtatttggaaaaactataaaaagtaatgatattattgaagtcttagaaaaagtaggtttaaaaaatttatacttaaaattagaagctggtttagatactaaattaggtgaaaaaggaactacattatcaggtggagaaaagcagaggctagcattagcaaggctttggttttcagatgctaagataattatattagatgaagctacatcagctttagacaatattacagaggaaaaagttatgctaaatgttatggaatttttgaaagataaaacaactattatgattgctcacagatttaactcaattaagaatgttgaaaatataattgttcttaaagaggggagtataataggtagtggtagctttaaaaaactattagatggtaatttatattttagagaattatactatacaatgtcataattattatgtaagtataagaaaatatttttcttaatttaatattatttaaatattactggaatattattaaaaatttgagattccagtaatattttttagtattattcttaatatttacattaacatatattcttccatttttattaacttgtatttaaaatgtaatatttttatataaatatgaaaaatatcaagtatttaaattaaataaattcatatccattaattgagggatagatattaaaagattagaatttatgagttattagaaatattctatataaatagcatagaaaaatagttaaactaaattattaaaatataaaaatatacataaaaaataaatgtaaatatcaaataagatactatataaaaatagatataagtatcttttttattattgaaattatgaaaatatatttgatttcacacaaaaaagagtgcctcatgaactaaaaagttcattttgagacacacttttacagtgtcaaagaacgaagtttatccttatccaatacttttataccaccacgagataaagacacaataccttctctagcaaaatatttcaacattctcgatacaacttctctggcactacccatatacttagcaatttgctcatgagtcatatttatagtgctactgccatttttagctatctcatcaattaaaaaagatgccaaacgcttatcaaaactcataaaaagaatttgttgcatagcccacataacatcagaaaaacgttcggtagctaatttatatgaaaataactctgcatgaatattttctgtagataattttgcaaaaacagaggaattaatctgtataatatcgcagtccgtttcagcatctacatagacatcaaaagttattgtttttagaatacaggaagctgataaaatacatacatctccatcatcaagtcggaacagtgtaacctctcgaccttcatctgaaagtatgtatgtacgtattgttccagactttataatcaaaataccaatacagtcactatcaccacaatgtactggattcccttttttgtaatccgaggtatttgctgaagaaattaataattctttttgtaagtcagtaagtttatcccaaaaaggcaagctatgtgtaagtatatcaatttcattttgtgaaatcatacaatatctcctttcttaaattgttataatcccatgatacaagtgaatagataaattgacaagtagtttgttaagaggattatttagtcagatagtaatagtatgatttatgtagaaaaaatatgataatatatattcttgctattaatgagaaagtaatatgttttgatgatagtaggtttgtataactaatgcataccgtttatttttaaaagattaagttccttatgtaaccttatagacataaaaccagcaattatagcagccatcaaatcagctattggttgtgcatataagataccatttaacccatagaatacaggaataatcaaaattatagggataaaacagacgccttgtctacacatacctaaaaatccaccttcctttgcttttcctagtgctaggaataatgtagaatacactgtatagaatccaaatagcataaatgaaaacccatttgccctaagagctttactaccattttctattaatagaatgtcaccacttgtaaattgtgaaattatagattttgggaaaagcaccaatataagaccaagcactacacaaaatattgtagtccataatatggaagtttttattgctatatgtaatttatcgtagttcttcgaaccaaaattataaccagcaattggttggaaaccttttataaaaccaaatacaacaagactacctaaagatgttattcgtgttacagcacccattccagctatcacagaatcaccatactttgtagcctccatattagttaatgtaatggcaagactagtcaataattgaaatattaatgtaggtatgccaatttttaggatttctgaaaaaatttcttttgaaaaacagcattcgttaattctaaaactaaatatacttttcttgcttaaaatatatcctacataaacaagtgttgaagcaatctgtgagatagctgttgcaatagaagcaccccttacccccagaccaaaagtataaatgaatatcgggtctaaaatcatattaagcaaagcacctaataacatagcacacatagttgttttagcagctccttcacttgtgacaatattagtcatagtgacattgaatatattaaaaatagatgacacgacataaatgctagcataagatattgcataaggcataatactttttgtagctcctaacaattttaaaattggattgagaaaaatcataatcacaataataactaatgtacccactataatactactgtaaatagatgtacttaccacttttcctgctttttcattatcaccatggcctaaaagtctggcaatatatgaagcagctccatttccaaacaataatcctaatcccacaacaagctgacctaatggaaatgcaacggatatagctcccatttgacttgttccaagtccacccacaaagtatgcatcaaccaaattgtataatgcagttatcatcatacctatcatggtaggtaatcccatagataacaatgcttttgagattggggcagaccctaataattcaatttttttgttactttctttcatacttaacactcctcttctattgacattaagtctaaattataatactataaattatagtaagtatggaaaatagtactataatttatagtatttgtcaatagtaagaaaactaaaggagatgatttttatggctacaatagatttaattgtattgggaatagtaaagcaacaacccaagagtgcttatgatattcaaaaggcagtggaatacaggaatatatcacgttgggttaaaataagtacaccatcaatttataaaaaagtaattcaattagaacaaaagggatatattgaaagtaaaactgtgaagaatggaaaaatgccagaaaaagcagtttattcattaactgaattaggtgagacacattttttagatttaatgtttgatacatctagcaaaccaataaatattcttttagattttaatgctgttatagtaaatttaaatagccttacaccagaaaaacagaaattatgtctcaataatattgaagagaatgttcaagagttaaagaaaactattgaggaaaatataattataaagacagaagtaccagagacagcaaaagcagtgttggagcaacagttggtgctagcacaagcattggaaacctggataaattctttaaaagataatatggggaattagaattagagaagctaacttaataatcattaaacaaaaaccagcatatttaataatgagatattagaaaaaatgaaacaaatgatataaactgaaaagtatatttaaaataaagctcacttaattgagggagaatgttaaactttttaagagcaagagcaagagcaagagcaagagcaagagcaagagcaagagcaagagcaagagcaagagcaagagcaagagcaagagcaagagcaagagcaagagcaagagcaagagcaagagcaagagcaagagcaagagcaagagcaagagcaagagcaagagcaagagcaagagcaagagcaagagcaagagcaagagcaagagcaagagcaagagcaagagcaagcagtaaagtataaaattctattactataataaaagatagaactagaagtctttatgaaagtgggaaaagtatttatataaataaatttatatggtttatagtttaacagtaggaaatatcgtatgagtgagaatatcgtattttacataaagatttagcaatatgacacactgttgtcgtgttctgtaggatatgattaataaatcagatatgaaaggagagtgagtaatatgccagaattactaaaaaatatgtataatcgtgagtcactttatgaagttgcagtagctatccaatcagtttacaactcatttaaggtagacgagttcataaaatctacaatggatgagacatggaataacttagaattaaaagccagatgtcgaaagataagtatgagtttaggaatgtatttaccagaagactataaggaagctctttccattcttgaaaaatcagttacaggtttttattttgcttttttctttccagattttgttgaagtttatgggcaggacgaaataaattgggatttatctataagtgcattagaaagaaatactgagtattggtcttcagaatttgctgtaagagcatttatcatcaaggatgaagagcgtatgatggcacagatgcgtaaatggtctaagcataagagcgaacatgtacgaagacttgcaagtgaaggttgtcgtccccagttgccttggggacaagcaatatccaaatttaaaaaagaccctacacctgtactgcctatattggagcaacttaaaacagatacatcaacgtatgtacaaaagagtgttgctaataatctaaatgatatctcaaaaacacatccagatttagtcataagcattgcaaaggattggtacggtaaaaataaatctactaactggattgtaaagcatggttgtagaactctactaaaaaaaggcaatcgtgatgtattagccctttttggatatgatgatactacttctataaatcttcaggactttactttagaaacaacgtctatttctattggagaggatttaactttttcatttaatattttagcaaaaaaagcgacaaaaacaaggctcgagtacggaattgattatatgaaatctaatggaaaaaggaataggaagatatttaaaatatcggaggtttcattaaaagaaaatgagaaaaagtcatatatgaaaaaacattcatttgcagatgtaagtgtaaggagacattatccaggtatccactcgattactattattattaatggggtagaaaaaggcaaacttgattttgaattaggtgtataattttactaacagcataacctatatcagatactttgctaaacctatatcgtatactctaataaatctatattaggtagtttactacttgtttactgaatttaaatacaaagaaatacaggtgttaatccctgcccattaaaggaatatgagcataacacaaaagtagaacttatcaattctgttacgggtatagtagtaaatccatagaatcacaattagaagatgaagtgtaaaaaataagttagtgttgattttagttgctagtgatattgaatagttatacaatagccatataaattagaatttgtagaggagaaatgtaaatggatgtatatagtttttggaatgacactttggcacaagatgctgttaagataagaaaatattttcatgaagatgcttatattaattggcatgatacaaatgagcattttactttagaagaatttattattgcaaattgtgagtatcctgataaatggaatggtaaagtagaaagggtgctagaatttggaaatttagtaattacagtgacacatgtttatgcaataaataaaccactatcatttcatgtcgtttcatttatcagccttaaagatgataagattatttctattgatgaatattggggagaggatgatgatgtgccacagtggagattagataaacatattggaaagccaataaaatagtgtttgttctgttttataactgaaattttgataacatttgatattttgatttgtcattggtcaacatagtcgttagtgtaataatttaaaaaagtagaatttggagagtgagcactatggaagaaaaatacatcttatctgaccgaggtaaagtatattattggataaaagaaagtaatagtgtgtttgcaaagaacttaatttttttgccaggactaacagcaaatcatcatctttttgatttccagatacagtacttttcaaaaaatcataatgtattggtatgggacgctcctgctcatggaaaatcaagaccttacttagatttctcatattctaacttggtagaagaattgaaagtaattttagataaacaaaatatgaaaaaggttgtacttatagggcaatcggcagggggatttgtggcacagtcctttattgtaaaatatccaaatatggtagaaggattaatgatgattggaacttgtccatatggaactgactattatagtaagtcagatattttctggttaaaacagactgaatggatgttaaagttattcccagataaattgttgcgaaacataatatctaagatgtgtggagctacgtctgaaggcagaaggagtatgatgaaaatgttagaaggctacgaaaaaaaagaactgtgtcatctcatgtatctgggatttgctgggttcatgccagaaattcaagacttaaatatacattgtccagtttgtttggtggttggagataaagacaagacgggtaaagtgagaaaatataatgagcagtggcacaataagactgggtatccattgcacattataaaaaatgcttcacataatgtaaatgtcgataaacctagtgaactaaatcagattatggatatatttattaagcaattaaatatataaaaactacatactcattaggtaaattatgtagtatatgtgtttacatatggttatagaaataaatatgtaataaactacttaacacttaaaaagtggatttgtccagagcataatacaaagcatgatatataaatttttaagcgaaatacatcaaaagaagtattagaattagtggagataaaacagctattagagattataaataaatagttttaaaggtactacgaatatagaggaaggtaaatcatacgttattcaaggattataaatgagtagtttaaaagtactatcggataggtctctgcatatttaaaccttagtaaaggtagttaaagtagtagtttaaaaactaaaaaattatataaaggaattaggtataagaaaatgattgagagtataccagcaaaacaaattttacaaaaagtgaaatttgacaatacaagatggtttggaattgactataatatgaatctctatcgtggttgttctcatggatgtatatattgtgatagccgtagcacaatatacaacatagagaattttgacaaagttagatataaagaaaatgtgatagagattttaagtaaagaattgcgttcaaaaagaaaaaaaggggtagtaggcattggagctatgtctgacacatataatccttttgaaaagcaactttgtattacaaagcaagcactagatttgatttcggaaaatcattttggagtgtctattgatactaaaagtagtttggtggttagagatataccgattttgcagaaaattaaaaaaaataattctgctattgtaaagttgactataaccactgcaaatgatgaattatcaaagaaaatagaaccttatgtaaatccaagttctgcacgatttgacgcagtgaaagaacttaatgattctggaattttttgtggcatattattgactcctatgcttccatttttgactgataataaagatgaaatacgagcaattgtagaaaaagcacacaaggctaatgcaaagtttatttattgcatgtatggtgtaacaatgcgtagtggtcagagagagtttttttatgagcatttaagagatatatcaccaaaattagtacttaaatatcagaaaacatatggtttaaactatgtatgtactatacaaaataaagattcttgtgagaagttgttaagagaagaatgtgcacgttatggtattttgacagatatgaaagagattataaaagcgtacaagaggtcggagtcatatattcaaataaaatttttttaagataggctttggatgagatataatagtggtgattgatgtgttgatattatagttgattgttagagaggatattatagatgaatattaatattgatattctaggtaattgctagaactaatattatagatgaatattagtattgatattctaggtaattgctagagttagtattatagatgaatattagtattgatattctaggtaactgctagagctaatattatagatgaatattagtattgatattctaggtaattgctagagctgatattatagatgaatattagtattgatattctaggtaattgctagagctgatattataatttattattaatattaatattctagggaattatcactatattttaaaaagtaaaaatatatatcaaaatgaactaaataagtactgtaagaagtttgttaaattaaggtttgaataaagtgagggtggagaacttatgatagaaataaaaactatagaaataaataaaaaaagtcaaattgaccttttaatgttagccgacccatgtgaagaaatgattgataaatatctcaataaaggaactatgtacgcattgtatgataataaagaacttacttgtatagcagttgtaaatgaaatttccaaagaaatatgtgaattaaaaaacattgctacatatgagcattttcaaaatatgggttatgcctcaaagatgatttatcatcttttagatgtttatagtaaaaaatattcatcaatggttgttggtacatctgaaagcggagttcctttttatgagaagtttggatttgtttattcacataaaattaaaaacttttttgtagataattatccagaaccaatctttgaaggagaattacaatgtgttgacatgttgtatctatcatataacttttagataggataatatttttaggtagatataattaattaattcatataattatcggaattataatttataaattatgtataataagagtataatttatttagaagctgttatattgtattatattcaaataagatatataataatttgtttattttgaattttggaggattaattatggattcaaataataatactataaaatcaactgttaaaaagggtatttcttttggttcttgtttagcaatgattatttcttatactgcatggaaatctattccatgggctatttttcatggcttaatgagttggatatatgtactttattattgggttaagtatgcatagattaaattaataaataagtatgtaatattgtaaagtttaagaaacaaaatgtaagggagtgtctcgaagtgaactttttagtttataaggcactcttttttgtattaaataaaatatattttcattacttaaacaatgaaaaagatgagtatctctattttaatacatacccttatattcattcatttatcaacaatagttttaaaaagaaagctatctaaaatctattgtaatctaagtgcttctctttaaagtcttaactttagtaatgatatataagtttataaggttcttatttcaataatgcaaattttacttagaagttcagactttggtatgaagaaatgggtaataataaaaaagaggtgttgatatgaaagaaaaattagaagaaaaatctaagattattaaaacatcaaaagagtataaacgaactataattgaagaaaaggacagagaatgaaccaaaaaattaaatgacatacttagtagaggtgatttttctaatgaaaaattagataaaatcaaggatttaattccaaaagaaatattgactagtgaaaatgttggagaagttgtaactgaagatgggtatgctaagcctgagtatgatgaggtatttaaatcattgtttactttaaataatgattacgatttacttgcaaattttataaatgatatcctcaaagatgctccatatgccaataggaatatcaaaccgttcactcatataaaaagaataattaaggctgaaaccgacccaacaattaattacattggtgagaaaagacctagactttatattttggctgaagatgaagaaagtaatcatataaatattgagatgcaaagagctcttgaagatgattatttggaaagagctgaatattatcttagtcgtgtacatggtagaaagttagaagaaggtaaagagtataaagaaattggaaaaactgttggaatacatatactaaatcatgtaaaatataatcacatagaagattatgtaaattgcctgagattaacaatggacgggcatccaaatatttattctagtaaaactgcattatattttatagaacttccaaaaattcgtaaatccagttgtatagcaaacagagttctaatatggggtaaacttattgataatccttctcatattgatattagaatactatctaaaacagattatgttattaaaagagcacttgatagattaaaagaattaggcagtaatgaggactatttattaaatttaaagagaggtgcgtatattatgaataaaagtagaaattttaaagaagaaatttttcaagaaggtgttgaaaaagggaaaagagaagagaaatttaatatcatcataaaattaaaaaataaaggatataatttgagtgaaatatgtgatattatagatgatttgaataaatcagaggttgaaaaaatctataatcaaaactaatactataattgagatggcactagataaatataaagcttcctcttttaaatttaaattaatataaaaccttgttatttaactatagtagatacaaagagatatataagctaaggagatgattcaaaataaaagtttgaactatctccttcttatagaaaaacaaaggggttgatttatatatgaaattttatactatacagactttagaattttggaacaacaataaaaacaataaatatctatcaaatgattattcttttatattagaagactttgatattccatacaaatggatgtatagtcaaatgacaaatagaatatatgaatttgatgatagtatgatatgggtttggacgaagagacctgatttaagatgtagtggttatttagaaaaaggaaaaaaaggtgttttacttgaaatagaaataagtgaagacaatgtgttattatcagaatttgatttatggcatttacctttaatggatattactgtagagctttatgaagatgaacaaattgaaaagaaggtaagttgggaaagaatatttgacttagaactgtgttcaaaattaaatgaagttaatatagaagatttgacattgcaaggagtgacatctaaagtgcctctatctaatgtaaaattaataaaagaatttgttgcaaaataatatttttattgaaatttattcaaaaaagttatatatttataacaagaggtgttataaatacataactttttaagggggattttatatgtctaaacaacaaactggtattaaatcaacacttatttcagaaatattgggaatttcttattgtattggagctacattagtaaataagtatttttttaaaggaagtagtattgaatatcttcctataattatttgggtattagctatgggagctcagtgggtctataataaaaagtatgatgatttaattgatgaggcatcaaaatgtatactatcaagagttaatgatattgcaataaaagtattgtttttttctgtagctatagtatctatatttcttgtaactttggacataaatgtgtcaaatttaaatataggaatgtctttattagtcattttgtttattcaatccttgttgaagttaattctatttatatattttgacagaaaggggatatacaattaggtgtcagtattactaaagacaaaaattaaatcctatagagaaaagaatcttatgacacaaggtgaacttgcaaagtcagtaggagtaagacgtgaaactattgtacatttagaaaatggtcgctacaatccttctttaaaactggcaatggatattgctaaggtatttgatacaactgtagaagagttgtttgaatttattgaagaaaataatatttaaatttcatgtattacttatgcattagagaatgaattaatagataaaaaattcaagtttatgtattagagaatgaattaattataggtaaaaaaccaagcttatagattagagaataaatgacttatagatgaaaaaccaagctcatagattaaagaatgaatgatttatagatgaaaaagaaagcttatagattagagaatgaattaattataggtaaaaaacaagctaatagattaaaaaatgaatgatttatagattaagaagtaagcttatagattagagaataaatgacttataaataaaaagaaagcttatagattagagaatgaattaattataggtaaaaaacaagcttatagattagagaataaatgacttataaataaaaaccaagcttatagattagagaatgaattaattataaataaaaaccaagcttatagataagaagtccatgcttataagccagaaaatgaatactttaatagattaaaaaatacatatttgtgaattatagaatgaataactccataaactagaaaatttataataatatctatatgaaaattagaattattttatcacaaaaaaattaagttaaataaatatgaaattacttccaaatatacttccaaaaacatgtaatcgcatatataatataattataaaaataataaatatttttatagtagtagttaattattaataaggaggggtcaaaatgcctagcatgattatggaagttgtaggagtactatttatagctattggattaatcttgacattcattgaaataaaaggaaatttcccttctttttatggttttggtcaaaattctatagggaaaaatgctgtaggtattatagcagcaggaattgctttaattttctttagaaatggcatagatagcatagattctatagctacttatggtgtatttttagcaatagaacttgttgtaatagttgcatatttcttaataagaaaaaaatttactaaagaagataaacatttaagaactaattaactaaattatctactataaaattggaaaattaaaaacaaataaaagtttgtttttaattatttaaaatcccaatttgattatttttaaagaaactatattctgtataaaactagaatgtggtttcttttttatgtataaaatattttttagcaaaagttaaaaggtgttttataatataaaatagttaattgtagatgttaataaaagaaaattatgtatatttcagataaagataagagagtatactatattttaattattttttcaataaaacttattgaaaagaactttaacttagaagagtatcaccaaattgcagatacaatatcataagcagttatttattgacaaccctttttaataaatatatcatttgaagtatactgacgaaaaggagttgaataataatggacatcttattggttgaagatgataagaatattcgagaaatggtatacgattttctgattagtgagaattattttgttaaaactgccgttgacggaaatacagctattgaaatatttaaaaattattcatttgatattattttactggacttgatgttaccaaagtctagtggttttgaagtattaaaatatatacgaagtgtgagtgttgttcctgttattattactactgcgaaagatagtgacacagataaaatgctagggcttaatcttggtgcagatgattatattacaaagcctttttcaatcgtagaattgcttgcaagaattaaagctaatattagacgtgcaacggtgtatagcagttcaagaaactctgaagatatggttattcagtataaagatttgattataaacatatcaaaatatgtagtttcaaagaatggaattgacttaaacttaacacatacagaatttgaaattgttaaattactagcgactaatcaaggacgtgctttttcaaaggaacaattatacaacactatttggaaagaaccttattatggaaatgaaaatgtgctaaatactcatattaacaggttaagaaataaattgtctgatggtatagaaaaaaataattatattaaaactctttggggaattggctacaaaatggaggaagaataatggagttatttttagttgtaatttcgattgtactatttgctttctacttaaaagaacgaaataagtcaaagaaaatggaaagtgattataagtatatcaattcaagacttcgtgatataacaaatgatgatgaaattaattatattttagtaccatctgatatttcgattgtaaaagaaacagcagtagatataaataaacttcttgaaaagttttacagtaggcaaattaattataatagaagtgaaaaagcgatattgcaaatatttacaaacatatcacacgatttacgaactcccatcacagtattaaagggttatattgaaatgctatatcttcaaagtcaaaaagaagaattatcttcttcaatgagagcaactttggaaaaaatgcaaacaaattcaaatgagcttgttaattcaataaataacctgtttaatatggcaaaaatccaatctggagatatgatattaaatcttcaaaaatccaatctaacacaattatgtcatgagattattttagagttttatgatttactagataaagaaaactttaatgttgaagttaatattgaagatagacctatatatgcaaatgttgacacagaagcattacaacgtatactcaaaaatttaattgataatgctataaaatatggttcagatggtagatttttagggatttcactatatgaaaaggaaaaacatgtttttatagatattgaggataaaggttcaggtatttctgaaactgaaaaagagcatattttcacaagagcttatactgctgacagaaaaaaaggcaatggtttaggtttggctatttctcaagggcttgcaaactctatgggaggttcaatttatgtaaatagtagacctaatgtaaaaacagtttttacggtaaaattgaaaagttagaaaaaagttagatttaaaagagagaaaagataattttattttgtatactgtttttagaaaggagggagtatgatgaactatatcatagagacccatcaattaaagaaaatatataaagataaagctgttgttaatgatgttaatattcatgtgaaaaagggagaaatttatggatttgttggaccaaatggagcaggtaaaagtacagtaatgaaaatgttgctaaatctcgttaagccaaattctggagaaatagttatgttcagtaagaaagtggcagaaactgattttgaaatattaaaaaagattggtactattattgaaaatccttatttctatgagaatttgactgctaaacagaatcttgatttacactgtgaatatatgggttattataacaaagaacatatatcagaggtattggaatgtgtcggattgtcaaagcaatcaaacaagaaagtttcaaaatattctttagggatgaaacaacgtcttgcaatagctagagcaattcttactaaaccagaattattgattcttgatgaacctataaatgcactcgacccagaggggataagagaaatgcgagaattattccgtaagttaaatacagattatggaataactatatttatttctagtcatattctttcagaggtagaacaaattgcggacactattggaattattcaagatggtaaacttattaaagaaatttctatgtcagatatacacaaatatcaaacagattatgttgaagtagatgtagataatgtggaacttgctggatacttgttagaaaaagaatttggaataaaagactttaaaattacttcggaaagttgtattgaaatatatgatttacgaaaagatgtaaaagaaatatccaaaatatttatcaaaaatcaaattggtataaatagcattggacgtaaacaaagttctttagaagattacttcttccaaactacaggtacaggaggtatagaaacactatgatacatttaatgaaactagaattaaaaaaagttgggctaaaaagatattttttattttcaatactggggattttgttatgtatgttttttgtctttactggattgaatgataaatctacttcaatatatgattatgatgttacatttaggacaatcagtttagttttctgtttttactatattatattatttgctgtgttgaatgtggcatatataataaatgaatatacaaataaaacaatcttgattttattctcttatccacttgaccgtaaaaaacttattttatcaaagttacttttgattacgactcttatgatatcatcaatgatagttggatatatctgttgttttacattcgttgttgtgttggataagtattttaatttagttattggagattttcatatttcaattttatcttattggataccaggagcaattaaaagtattattgtattttgctcattaggtatatggacattcgttgttggaatgataagaaaatcaatacctgttacccttgtcagttcaattatttttatcaatttaagacaatttattttagctggtacaaatacaactcaagacagtctgatttctgtttttattatagttggaataactgtgattggtatatattatatactaaatcataaagttactgaaattgactagatactgtggataggaaggtagttattaattgtatcttcttgggataataatgatttgctattatatcagctattattaatattattagagttttaataatattaataatagctatatattttttcttcttatttataaatttaatgatttatagtcataaaatgaactctaagaagagataaaaatgcgttttatatgtttttagattaatatgaaatatcacaatgaaatgttgtacaaagtgatatataataattatatgaactataaaattgactaaacttattgactaataaattagatgaaaagttgagacttactgaaaataaatacaatgaaatatatactacaagtattaaattaaatctgaactttacatactattagaataagtattataagattataatgatttaaaaatattaaaataattgaggtgataacatgaacaattcctttttagataaattgattgagacaaaagaacttaaaaattcactttataatgtgttaaaacacaattttctttatcattctaataagatagagggcagtacttttactactgaagcattagcacttttactcgataagaatgttgttacaggaagacatactttagatgatgtacaagaaactgttaattctagttatgtatttgatacagtaattgactcactgaaagagaaaataacacataatttcttaaggaatctacattcaagtttaatcttcaatacaaccctacattccagagggatggctggtatatataaaactatacccaatatgatactaggaactgatgtaagcatagcacaaccatttgaagttgagccaaagcttgatgaattaattgaatggtactatagtcagagtgaagtgtctattaaagttatagctgaatttcattatagatttgaattgatacatccatttcaagatggtaatggtcgcataggtagatttgttatgctaaaacagatgttagaaaataatcttcctataaaaattgtatcttgggatagtgaggacttgtatagaaactccttaaattcttgtagtttaggtaattatgtccctttaattgaatatttatcaagtttagaagattttagagaagtatataaaatgttatggaaataattgtttgtagcaaaaaaagtttttatataaatatatttttaactatgctatttaacgttgatttcttagttattcttagcttggactatacccactattttaactatataaaatagtggatatagtttaactatctctttataactatttttatgtatcttagttgtttcttaatattgggacagttcataaaactaaaagtgatttttaattttatcatttataatttaccattacatcagaaaaatgcttatcattagaattttcataaaaggtacctattttcttcaattaactaaatcaattctattagtcttaatctttcgtatttcaaattgataatacaagaaaataaaaaataaaaaattttaaattttttatttattgcgaaaaaaataaaaaggtgctatactttttgtaacatattattcaaattattaagagatagtaaatatttatagtttaatttgtagtacactagcatgatttgcagaacaatgaattaatctatagtataatagtttaatttgaagtacaacgatttaatctatagtacactagcatgatttgaagtataacgatttaatctatagtacaataacttgatttgcaatacaataatttaatctatagtataatagcatgatttgaagtataacgatttaatctatagtacaataacttgatttgaagtacaacgatttaatctatagtacaataacttgatttgcaatacaatgatttaatctatagtataatagcatgatttacagtacaataatttaaattgtagtacaaaagtactatcaaataagaatttctactttaaaaatattactaaaagtaattaaaatccaataattcaatataatatggcaaaagaatagaaataaggtgagagtagtgaaagtaaagtcaaatttagatgaaattttatatcataagattattgaaagtcttattcgtggtgaatactctgtaggtcaaaaaatattactaaatgacctttgtgaaaaatttgaagtaagcagaacaccagttgtacaagcagtaaaaatgctaaataaagatggagtgcttactattatgacaaatggtaaagtgtacgtaccagagtatgaatatgatatggtaaaacaagtttgtgaaacgagaacactgattgaaacatatgctttagaaaaaatgatgcaagaagaggaagaggtttttcaacaaaagctagatgtaataaaaagatactctgataaatgcgaggagtactatcgtcaagaaaaatctgtagaacttgcactagcagatttggaattacataaagccattgtagaaggggcaaataatgagattttaaatgatgtatatgttggtatacaaggaagatttatagtagtgaactatttaattcgaccattaaaaaatcgtaattatgaaggaacagtacaagaccattttgaaatattaaaattcattgaagacagagatacaaaaaaagcagtagataaactaagaaatcatattcaaggaactattaaaagattctgtgaagatgaataataagttttgaagttactatatacttatctattaagttgctaaatgtagtctaagtataatctaattatagtttaaacataatctaaatataatctaaatatagtgtaaataagtctaagtatgaattaaatatagattaagtatgaattaagcatggattaaatatactttaaattacaaatattacaaggaagccagaaggcttcctaaaaaaataacctttataaaattttttattttaaatttaaaattttttattttaaatttaaaataaaaaatgaaagaggtggtagagagtttgaaaaaaattactaaagaaaggatagaaaatactatgaaaaagctatttacgagcgaaacatttttggaatatcaatttataagtgattgccaaatatcaccagatggaggatatacagcatttattgtaaaaaaagctgatatcaaagagaatggttacacaagccaagtttatatattaaacaataaaactggcgaattaaaacaaataacgtctataaactctgttggagcatatgtctgggaagatgaaaatactatcttgttccctgctttgcgaaatgaaaaagtaaaagaagctgtcaaaaacggtaagcaatgcatgagttactatgctttatctttaaatggtggagaagcagaagaactttttagactccctatcaaaggtggtaaattgaatcctataggaaaaggtttgtatgcagttattgattcttatgacaatgaccgacctattgtagagggattgccagaagaagaacaacagaaaaaaataaatgcttataacaaaagacattatgaacatttcaaagaaattccttatgctgtcaatggggagggatatattagcagaaaaagaaaacgcctatatatatacgacagtaatataaataagttgaaggcaattacagcacctatgtttaatgttgtaggtatgaaaataagtgatggaaaaatcttatatatagggcaagagtttaaagatgtaaaaggtttgaaaaatggggtctatgtatttgatacaaacacaaacacaaatatctgtatattagaaaaagataagtatattataaaaggttttgaattatatcaaaatcaagtgatactaaacctaactgatgctttatcttatggaaatggagaaaatggagatttttatactattgatattgatacgaaagaaatgaaacttctttcagggcatcaacatcattgtattggaaatacagtaacatctgatgttaaaatgggtgctggtcagacaacaaaggtagatggagaatatatttattacacttctacagtagatatggactgcattattgaaagaatacatattccaacaggaaaacaggaaaaagtaacacagacaggttcagttgattttatagatgtaaaagatggcaatattgtatgtgtgggttgtttaggaaatggattaccagaagtttatacagtagagaatggaacattgtgtaagaaaacacatttaaatgaccatattttagaggaatataaaatttctgtgccagaatacatagagtcaaaaggaagttctaaatgggaaatacaaggatacgtatataaaccagtagattatgaggtggggaaaaaatatccagctgtattggcgattcatggaggaccaagattgacatatggaccatattttatgcatgagatacaggtatttacaagtgcaggttactttgtattcttctgtaacccaagggggtctgaaggtcgtggcaatgcttttgcagatattaggaaacagtttggagatattgattatatagattttatggaatttacagatactgtacttgaaaaatatacagacattgataaaacaaaattggctgttgaaggtggaagttatggtggatttatgacgaattggataattggtcatacaaaccgttttgctgttgcttgtgctcagcgttctattgcaaactggagtagcatggagggtacaacagacattggttattatttctgcaaaggacaaacaggtgcttctcatatggaaaaccacgagcttcaatggaaacagtcacctcttgcttatgctgataaatgtgttacaccgactttatttttacatggtgaaaaagactatagatgctatatgcaagaagcattccagatgttttcagcattgaaaattcatgggtgtcctacaaaactttgtctatttgaaggggaaaaccatgaactgtctcgttctggtagaccaaaacaaaagctacaaagattagttgaaatgctagattggttttctgtgtacataaaaaaagataacataggacagtagaaaggagaatataaaaatggaaaaaataaagattgaaagttcagatatttttgaatatatattccctcatgatatttcttgttcacctgatggaaagcatattgcttatattatatcaaatatcaacgaggaaaaagactgctatgaacatgacttatatgtgatggacatcaaaacagaaaaacaaatacatatgactcaaacaaaagatgtaacatcatttagttggatttctaatacagaactactttttacatctaaaagaaataagccaaaagcaggtacaacagatttttacactatttctatagaaggaggagaagcaaaagaagcattttctattccaaaagcttgtagcgtacctgtatcacttggaaataaattgtggttattgacaacaaaaaatccaacggattctaaaaaatcagaaccagatagggcagtagagggtgtagattattggacatttacagataaaccttttataagagatagagaaaatttttctcaaagaagacgtgtaacattagaattatatcaagaaggtgaaaatataacaaaagccattacaccaaaattttgtgaagtagcaggtatagacgtttcttctgataaaaacagaattttatatactggtcagatttatgaagattgtgcaactcctttttctggactttgggagtatcatatagacagtggtgaaaccaaagaacttgtaccacaaggaaagtaccaaataagtttggcaaaatatattggcaaagataaagtaatgttgcaagcttcaacattagaacgttctatcacacagaatcatgatatttttatacttgatttgagtactagtgaaataaatatgattgctagtccagatggtatgtatgctacattactggatgtagatgcagtatatggtggtggacgtagtaataaagttataggagataaatttattggtgcaagaatttgcagaactatgacagaatttaatgagtttgatacaaagacaggtaatatacgtatcatcacaaaagtagatgcttttacatcttttgatatttacgacaacaccatgtacacagtaatgttgaaagattatgagttagcagaaatatatagcattgatatgactacaggtacaatgaaaaaaatgactgctttttctaaaccatatttagatactcataaggtttcattacctgaaaaattgacgtttgtagcaaaaaataaagaagaagttgatggttttgttataccacctatagatgctaaagaaggcgaaaaatatcctgctgtattgttcattcatggtggacctaaatgggcatatggctatatgtttacacacttgaagcagtgtgtaacatcaaagggaatgtatgtgatttattgtaaccctcatggtggtgacggttatggtgaaaaattcttagaaatggtagaaagatgggggtatgttgactatgagcatcttatggaatttgtagatacttgtattgaaaaatatcctgggattgatgcagaccgcttaggggttgcagggggaagttacggtggttatatgacaaactggataattggccatacagaccgtttcaaagcagcagtttctcaaagaggtattagtaacttgattacagcttctttaattattgactttggggatagaattatgaagcagacttgtggagataagacgccttggaatcatgaggaggttctttggaatcattcacctattaaatatgtgaaaaatgttaagacaccaacattgttcttacatagtgatagggattatagatgttttatgggggatactttccaaatgtttacagcattaaaacagcttggtgtagatacagaaatgtatttgttccatggagatacatatggattgtctagaaatggaagaccatctaatagaattgcacgagcaaatgctattgtagattggtttgaaagatatttataataagggggttattctatgagtgatatgttattatggtttagtgtcgtattagttttatttgctattggggatttaattgcaagcaaaacaaaagcaaaagtatcagctgtatttgttacactacttttatttttgattctatttgtcacaaaagcaataccagctgatattattgaaaaagcaggtatgaccgcagcagctagttggagtgttccaatgattatgtttagtatgggaacaatgttgaatgttaaacaatttatagacgaatggagaacagtattgacagcatggcttggaattgtagcagttatagtctgtgtctcattatgtattcctttgtttggaaaatcaacagtattgacaagcataccagttataaatggagctttacctgctactactattatgacacaagcagcactagaaaaaggactgacacttgcagcagctacagcaacagttgtatttgcaattcagaagtttattggtacaccaatagcttcaagagcagcgttacaagaggcaaaccgtcttttagtagaatatcatgaagcaaaatcaaaaggcattgatttagcaaatgttgatactgataagaaagaagcagagaatacaggcacaaaagtaaaacaagctttctgtgaaaaatacgataaatattattctacaaatgtttgtatattttttatagcactattctcttatctagggtatgaactttcagagattattcatgtaaattattctattgtatgtcttgttgttggtgttattgtaacacgtattggtattgtaccaaaagacattttggaaaaaggaaaaatcaagggatttattaacatggttgtgtttgcagctgttattccttctttagcaaaagtttctttgacagatttaattagtctttttgtaccaattgtgggtatgtttgcagcttctatcattggtatattccttatgatgaaggtgttaccaggttggaaaattatcggttctaaacctcttgcttttggagtagggttttgtcagatgttgggattcccaactacatatttaatttcaaatgaagtgtgtaatgctgttggagaaacggaagaagaaagagcatatttgatgtctaagattatgcctaagctggtagttggtggtatggcttgtatgatttctattgtagtagctggtcttatggtaccaatgttgtagataggtttcatagttaaaaagtggtgttaatttataggagaagctaaaaagtagtattaatttataaaataattttatattagttaatttgttataagaatattttctttttatgattataattttgattttataagagagcagattttttatttgctatgctaatagttataatttgtttttatttgctaaaatgcaactttaatttgatttatgtataatatagggtatttaataatatttttgaagaatttttataaaaaattaaaaagaggagaaaaaagggagtgccacaaagtgaactttttagttctaaggcactcttttttgtacgaaatcgaatatattttcaacgttttaaaagtgagaaagagacttatctctagtttgggatagccaaatttaattattaaaattattttttgttttatttatcaaagagtattcgtgttttagaagttagtattttttattttatatatccaaggttttccgtttctaatgttttcttttttaaaataattagggtattcaattatagtaaaaggtggatggtattttggaatgatattatttaaagcacagtattgaatgttgaaatcctcacattttagagtattatcttttgtaatcaaaaaaatcttctatacttatagcaaggttacttctgcaaatattccatgcatcataatatccaaatttaaatttttttaatatagagtttacctctagtctacactcttgaataactctttcctctatccaaattcttataaactcatcccatttattactatctatttattactatctaaattttttagtatgtttgtaattggaaatggatttattcctttatgttttttataaatagtttataacttaatttattattaaacaaatcattcatacagaattactttttcttttagatattcaattcttacttttaataaatatttaatacattctatcttatgtggttttaaaaagtgtttatggctatcaataatctctaatatttcattcatatttattttgtcatagtaatattttacatcttttatattgacaaaaaagtgctctaagtgtatagtgtgtatataataacatcacactggaggtgataaaaaatgaaagtgctcatttctaacacatcagataagccattataccaacaaattaaagagcaaattaaagaagcaatatttactgaagaactgaaagaaggggatgcaatgccctcaataagaaattttgctaatgatttaaaagttagtattttgactattagacgagtgtatgaagaacttgaaaatgaaggttttcttacacgccaagttggaataggaacatttgtttcaactggaaatttagaaatactaagagactcaaagaggcgtatagttgaacaaaaaatggcagatatgattaaggatgcaaaagcactaggaattacacagatagagttacaagaaatgatgggtattctatatgaggaggattaatatggaaaatattttagaagtttataacttaaataagacttataccaatttttcattatctaatataagctttgtattaccagaagattgtataactggatttataggtgttaatggagcaggaaaaacaacaacaattcgttcgatattggatgtcgtaaagcgtgatagtggaaaaataaaaatctttggtaaagatttcgatggaaatgagaaggaattaaaaaatcgaattggagttgtatttgatgattcatatttctatgaggagttgtcaatgtcagaaatgaaaagtattattgcaccttcatatgataattggtgtgaagaagattatcaacaaaatatgaagcgttttaatcttaatccaaaacaaaagattgatacactttcaaaaggaatgaaaatgaaatttgctttagcattagcattatcgcataaagctgagtttttaattatggatgagcctacaagtggtttagacccactaatccgtagtcagatacttgacatactaacagaatatatgaagaaatgtggtcgtggtgttttcttttctactcatataacatctgatttagacaaaatagcagatatgattgttatgattgacaatggacgtattatattagagcgtgaaaaagatactctattggatgaacatagaaaagtaaaaggggatattcaatttctaaatgatgaaatcaaaaaattatttttaaatttagaaattacaggttatggttttatagggattacctcaaaaattaatgaagtgcaaaaaaatatgccagatattttaatagagcgtcctacaattgaagatattatgcttgcatatattgaaaggagagagtaattatgttgattcatttagttaaaaaagatattctgattgtaaaaaaatatgtattgttgatattgtttattgcaataggaatcccattatttatattatggcgtttacctccatttgcacaaatattgggatttgtactatcaattatattttcagaatttatgctgtgccagtatctattattaaaggagagtcaatattcaaaagcatctgtattactttgttcaactccttatcctagacgtggcttagttcaatctaagtatgttttatttgcaatggtatttatctattgtacattagtttactggattgaaaatttacttattccacaaataggaacttttgacttaacatatattttgattgttttattaataagttctattatttatggagtttatatgcctattcaatacaaattaggatatgaaacaacaaaattctttttcgtgatgataatcatggcttcatcatttgtattaccattaactatagctcacagcaattttgaaattccatttatatatcagtatccatccatgatagtgaatattgtattgttccttttaagtttaattatactgttagcttcaatgtttatttctattaaaatttttagtaataaggagcttgtataaggtaagggggaattttatatgccacatttgccagattgggctgttttactttgtatcttacttccaatagtatataaagcttgtcagatatttaaaagtaaaaaatagagtacatatttatattgccatttttattgagtgaagttagatggtatgaatttaaaaggttacttgaaaataaagttacttggtgtgggagagtaacatcataatattatagattatatgtttcttgtgaatcaatttgtattttttaatagataatatccagtaattttattttccattgattattttcaattatgagtatgattgtgtgtattgtataccatcttttaaggtgtttttaaaaaattatatcgtcaaaatataaatctaaggaatcctataaataaagcttttcaattttagaaaactaataaaaagtaggaagttaataaaaagaagctgtctcaaaatagagataagcttctttttcattgctgaaatgacgaaaatataattgatttaatataaaaaagagtgctttatgaactatttattttgaacagtagatacacttgcactcaatttagttactcctaagctttatgaactaaaagtttattttgaagcctatttttctaaataatcatctatatacagtattgcgtttcttttatttattcataatttattttcttattaaagtttttctatattactttacttttaattttatacgaattatcaaaaataaaatagttattagaaaaaaataaaagtaattgcaaagattgcaattacttacttctatattaattactataccataaaataacaaaaaaatcaagtcgagtaatccttcaacttaagtgatatactaggtattaataatttttaattaataaaatataactagaggaaaatctacattttctcaatttctttaattaaattgacctctaattaagtaattataaggagaaaaattatgaatttagcaaagggattagatgttttaaaaatttcatcaaatgtattcggtgaagataaagttatgtatattcctgtaatctacacagaagatgatgcaacacttattgacacaggtcttccgggtcaaggtgatttaataattgatgctcttaataaaagtaacacgagctttgataggttaaaaaatataataattactcatcatgatatagaccatataggaaacataaattatctaagagaaaaatctaagaataatatcaaagtatatgcatacaaaagtgaagtcagttatataacaggagaagaaactccttttaaactttatatgttggaacaaatggtagataaaattgatgataagatgcttagtatgctaaatgttatggtacttggatttaaatcatcatatactaaagtagatgtgtcattagataaccatgaaaaattgaatctaggtgaggaaatagaagttatacatacaggaggtcacactagaggtcacatatgtctttatttaaaagagtctaaagtacttattgctggagatttgttacaggtagaaaatggagaacttacgcctgttgatgtaatgcacagcaacaaacaagagttaaaagatgctattaaaaatataagtaattatgatatagaaacgatagtttttagtcatggtggattatatcaaagagacataattggaacattgaaaaacctaattattgagtagtactatatgatttacaataatttcttaaattacttaaaattatatctaaagatgtagaatcaaaattaaatataagtaataagaattttgctttaaaattatacttaagtgttaagtatgatacgtagtattacaagtattttagaatataattttttatagtaattttaaggttctacaatacttcagttgaaaaatatttaacagcatagtataataggaaagaaaatattttaaataaactttagtatacaaagtgaagaaaaatatttaaattatatataatattgtagagtgaggtaaaatatttaagttatatatcataatacagagtgaagaaaaatatttagataatgtaccataatacaaggtgagtaaaaatatttaaagcatgtataataatgcaaagcgaagaaaaatatttaaataatgtaccataatgcagagtgagtaaaaatatttaaataatgtgttataatacaaagcgaataagattatttaaagcatgtattataatataaagtgagtaaaaatatttaaatcatgtatcataatataagcagagtgaagaaaaatatttaaataatatatcataatgtagagtgaggtaaaatatttaagttatgtatcataatacaaagtaaagaaaatcatttaaattatatatcataaaaataatatgaaatattgaacactcataatattggaggctttaatattttaattgataggttacattatttataacattaaaaatacaatttacataaaatagacatatgaaaaataaaaaattatataataattatgggaatgaggttctcccttggatgataatatcctaaactgccaatgagctgatgacttctatgatatcatagatgccaccagctttttttgttgtttaaatcgataaaatggaggtgaattacttactaaatttttattttttaaatttgaagaaatatttaattaatagaaaaaacagtagattatatgttaattattttattaagaatgggttaagagtatacctatatcctatcaatttaaaaaacaattatgatagtcattacattgactacagttgatgcaataaaactttcaaaaaatcttatgatgcaaatagaaaggaattaaaatgatagaaaaatttaaaactttaatatggattaaaatgataataagaattaaaagcgtttataaaacatatggtggactatttttgttaggactcataggtataccagttggtgcaattataggtcttatagacaccatatttggaacggttcttctaaaagttacagatattcgagaaacatatccaatgtatctgataccatttttagcagtagtaggagttgttattgcttattgctattttaaatttggaggaaaaagtagtaaaggaatgaatctaatatttgaggtagggcatggagaagaagaaattattcctttaagattggttccatttataatatcaggtacatggttaacccatttatttggtggtagtgcaggacgagaaggagttgctgttcagattggtgcaactttttcacattgggtaggtaaaaggttgcctataaaaaatgcttctagtatttttctagtaactggtatagcagctggttttgcaggattatttgagacaccaatagcagcaatactatttgctatggaggttttggtagctggttcactggagtatcaatcgctttttcctgcgtttactgcttcttttacagcaagtgcagtatcaaaaactttagggttagagaaattttcttttgcactttcttctaaagttgtatttgacttaccaatattttggaagcttattgttttaggaattatttttggaatggttggtggagcatttgcatggtgcctgaaattgtcaaaaagaaaaataggtaatagattaaaaaatcctatgataaggattgctattattggagtatgtcttagtgtattattccttttattttataaaggaagatattcaggtttagggacaaatttaattcaaaatagtttttatggtggagaaatttattcatttgactggctgttaaagtttatacttacaatactgactttgtcagcaggttttcaaggaggagaggttacacctttgttttccattggagctagtcttggtgtattgttagcaggattttttaatttgccaattgaattagttgcagcgcttggctatgctagcgtctttggcagtgctacaaatactttttttgctcctgtatttataggggcagaagtttttggatacagctatttaccttatttctttgtagtatgcgctatttcatatatatttaatatggataaatctatttattcactacaaaaaatttcaacgaaacaataaataaaacaacataatgtatgattataagagaaagaatattagagaaaggatagggtaggaatatgttgacaagtttagctttgatttttttattaggaatggcctcgggaggtatttttgagaagataaaattacctagcttattgggaatgttacttacaggaatcatattgggttcatatgttttaaatttgattgataattcaatactagatatttcttctgaccttagaaagattgcattgattattatattaacaagggctggattatctttagatataaacgatttgaagaaagtgggaagacctgctgtacttatgtgctttattccagctacttttgaaattatcggaatgatagttttagcaccaaaattactaggcgtttctatattggaagcagcagtcatgggtgcagtagtaggagcagtttctcccgcaattattgtacctaaaatgcttaaattaatggaagaaggttatggtacagaaaaaagtattccacagatgcttttagcaggaacttctatagacgatattttcgtaattgtgatgtttacagtattcacaggattggcacaaggaaatagtatatcagctattagttttttacaaattccagtatcaattatattaggtgtaatagttggagcagtgattggaatctgtttagcagtattttttaagaaggttcatatgagagattctgctaaaggggtgttgcttttaagtatctcatttttaatgataagtttggagactgctttagagggtattgtgccattttctggattattagcagttatgaatattgggattttccttcagataaaatatcgtgtagttgcaagaagattgtctgtaaagtattcaaaactatgggttggtgctgaaattctcttgtttgttttggtaggggcaacagtagatataagttatgcatttaaagcaggaattggagctgtaattttaatatttggagttcttttattccgtatggtaggagtattcttctgccttattaagacaaatttgacaataaaagaaagattgttctgtatgattggctatattccaaaggctacagtacaggcagcaataggaggtgtaccacttgcaatggggatagcatctggacaacttattttgacattagcggttctcgctatacttataactgcacctcttggagcttttggaattgatgtaacttataaaaaattattaacttctgtagaaggtaagagtaagtaagaataaaaataaagattattttaagtgataaattatattttggaaaaaactatattattgagtacaatgttagaaaatcatttgagtgattacagaaggtagaagtttatatcggattttaaggcatgtgatgattattagaattgattttgtgaaattgttattgtaatatttaattatatagataaagaagcggagtgataactatgtatttaaaaaaattatcaaaattagagttagttattatgaaatttatttggaatttagatataaaaaccaattcatatgagattattgattatatgaaagaagagcataatttaccagaaaaagtggctttaaaaattttatcaaaattatcaaagaaaagattcttatatgttcaagaaacaggcaagtgtatgtattatacagttgcaataaaagaaaagacatatttagagtttatatcaagaaatgtgcaaaatcttttgaagaataattttataaggaatttattagtatcatttcacgaagaggagctaacagaggaaaagataaagtcgttagaaaactgggtagtaaattgggaagaagcttatatataaatgttattatttttattacaatttagataattttggttttgtaagctctgcaactatttttagatggttgcagagcttatttttattttttattcccttaagcaatacttaaaagtaaacgcatttatatttactaacttcaatcacttctaatacttagattactttttaaaaatattttgatatgtcatctctatagtaatctagaacttgtttctattctttatataaagtttttatgaatgatatatataatattcgttcatttgattaaaaataacaaaatattaaataattctactctgatagtttgttaaaaaaataataaaaaatattaataaacaaaaaaaaaaattatcttaagagaggagaatgttctaaaatataaaaaggtttctagatttcataaaagatactattttagtcttgaaaatatttagtttgaaaagattttaatttaatgattgattaagttaaaaatgtgcatgtaataaattttattttatttattgactaaattataaagtttacataattatttaataattatgtaattgttacttaaaaattgatctattttaaaatctagttataacttcgaaaaagactgaaaattaagaaaaaagaaatataagtataaaaatatatcatatagattttttttattttactttaataaaatgatttgtttttacaatactttattaatataaagtttattgctaaaatactttatttattagaaaaaaattactaattaattattaaaattaatgtatttataatgcgtattttcatataaaatttaatttatttgccgattatataattataatgactgatttaattccaatgttgtcaaaatttttaaataaatcatcattataaatataagagaggatgattttatgcaaaagtctttttatgaattaattgttttagcaagaaataactcagtagatgatttgcaagaaattttatttatgtttaagccattagtaaaaaaacttagtagagttttacattatgaagagggagaaacagatttaataatattttttattgaattaataaaaaatattaaattaagtagcttttcagaaaaaagcgatgctattatagtcaaatatattcataaatcattactgaataagacttttgagttgtctagaagatattctaaaatgaagtttaattttgtagaatttgatgaaaatatcttaaatatgaaaaataattatcaaagtaagtctgtttttgaggaagatatttgttttttcgaatatattttgaaagaattatctggtattcaaagaaaagttattttttataaatatttaaaaggatattctgatagagaaatatcagtgaaattaaaaatatctagacaagctgttaataaggctaaaaatagagcatttaaaaaaataaaaaaagactatgaaaattattttaacttgtaattaatgaatttaaagaaatatttacaatagaaatcaaattttagaattaactttattgtaaaatcaataacttaatctaagaatatcttaatttttatattttatatagaacaaagtttacatatttatttcagacaacgtctttattcaatcgaagagcaaattaatcaactgagtgtcttcaatttaaaatgttaggaagtgaatgtatatgaaaacctaagtagatattagtatattttataaatagaaaggaggatatataaaagagttttagcatttagatgtaaaaatattcaataaaaatattatagtaaaggagaaaattttatgagtttagttaatagaaaacagttagaaaaaatggcaaatgtaagatttcgtgttcaggaagatgaatatgtagcaatattggatgctttagaagaatatcataatatgtcagagaatactgtagtcgaaaaatatttaaaattaaaagatataaatagtttaacagatatttatatagatacatataaaaagtctggtagaaataaagccttaaaaaaatttaaggaatacctagttacagaagtattagagctaaagaataataatttaactccagttgagaaaaatttacattttgtttggattggaggtcaaataaatgacactgctattaattatataaatcaatggaaagatgtaaatagtgattataatgttaatgttttttatgatagtaatgcatttttgataaacacattgaaaaaaactatagtagaatcagcaacaaatgatacacttgaatcatttagagaaaacttaaatgaccctagatttgactataataaattttacagaaaacgtatggagataatctatgataagcagaaaaatttcataaattactataaaactcaaagagaagaaaatcctgaccttataattgatgatattgtaaagatatatctttcaaacgagtattcaaaggatatagatgaacttaattcctatattgaagagtcattaaataaagttacagaaaatagtgggaatgatgttagaaactttgaagaatttaaaggtggagagtcattcaaattatatgaacaagagttggtagaaagatggaatttggcagctgcttctgacatattaagaatatctgccttaaaagaagttggtggtgtatatttagatgttgatatgttaccaggaatacaaccagacctatttgagtctatagagaaacctagttcagtaacagtggatttttgggaaatggtaaaattagaagctataatgaaatacaaagaatacataccaggatatacttcagagcattttgatatgttggatgaagaagttcaaagtagttttgaatctgttctagcttctaagtcagataagtcagaaatattctcatcacttggcgatatggaggcatcaccactagaagttaaaattgcatttaatagtaaaggtattataaatcaaggactaatttctgtgaaagactcatattgtagcaatttaatagtaaaacaaatcgagaacagatataagatattgaataatagtttaaatccagctattagcgaggataacgatttcaatactacaacgaatgcttttattgatagtataatggctgaagctaatgcagataatggtagatttatgatggaactaggaaagtatttaagagttggtttcttcccagatgttaaaactactattaacttaagtggccctgaagcatatgcggcagcttatcaagatttattaatgtttaaagaaggtagtatgaatatccatttgatagaagctgacttaagaaactttgaaatctctaaaactaatatttctcaatcaactgaacaagaaatggctagcttatggtcatttgacgatgcaagagctaaagctcaatttgaagaatacaaaaaaaattactttgaaggttctcttggagaagatgacaatcttgacttttctcaaaatacagtagttgacaaggagtatcttttagaaaaaatatcttcattagcaagaagttcagagagaggatatatacactatattgttcagttacaaggagataaaattagttatgaagcagcatgtaacttatttgcaaagactccttatgatagtgtactgtttcagaaaaatatagaagattcagaaattgcatattattataatcctggagatggtgaaatacaagaaatagacaagtataaaattccaagtataatttctgatagacctaagattaaattaacatttattggtcatggtaaagatgaatttaatactgatatatttgcaggtcttgatgtagattcattatccacagaaatagaaacagcaatagatttagctaaagaggatatttctcctaagtcaatagaaataaacttactgggatgtaacatgtttagctattctgtaaatgtagaggagacttatcctgggaaattattacttagagttaaagataaagtatcagaattaatgccatctataagtcaagactctattatagtaagtgcaaatcaatatgaagttagaataaatagtgaaggaagaagagaattattggatcattctggtgaatggataaataaagaagaaagtattataaaggatatttcatcaaaagaatatatatcatttaatcctaaagaaaataaaattatagtaaaatctaaaaatttacctgaattatctacattattacaagaaattagaaacaattctaattcaagtgatattgaactagaagaaaaagtaatgttagcagaatgtgagataaatgttatttcaaatatagatacacaagtggtagaaggaaggattgaagaagctaaaagcttaacttctgactctattaattatataaagaatgaatttaaactaatagaatctatttctgatgcactatacgatttaaaacaacagaatgaattagaagagtctcattttatatcttttgaggatatattggagactgatgaaggctttagtataagatttattgataaagaaactggagaatctatatttgtagaaactgaaaaggcaatattctctgaatatgctaatcatataactgaagagatttctaagataaaaggtactatatttgatactgtaaatggtaagttagtaaaaaaagtaaatttagatgctacacatgaagtgaatactttaaatgctgcattttttatacaatcattaatagaatataatagttctaaagaatctcttagtaatttaagtgtagcaatgaaagttcaagtttatgctcaattatttagtactggtttaaatactattacagatgcagccaaagttgttgaattagtatcaactgcattagatgaaactatagatttacttcctacattatctgaaggattacctgtaattgcaactatcatagatggtgtaagtttaggtgcagcaatcaaagagctaagtgaaacaagtgacccattattaagacaagaaatagaagctaagataggtataatggcagtaaatttaacagcagctacaactgcaatcattacttcatctttaggaatagctagtggatttagtatacttttagttcctttagcaggaatttcagcaggtataccaagtttagtaaacaatgagcttatcctaagagataaagcaacaaaagttgtagattattttagtcatatatcattagctgagtctgaaggagcatttacttcattagatgataaaataatgatgccacaagatgatttagtaatatctgagatagactttaataacaattcaataactttaggtaaatgtgaaatctggagaatggaaggtggctcaggtcatactgtaactgatgatatagatcacttcttttcagcaccatcaataacatatagagagccacacttatctatatatgacgtattggaagtacaaaaagaagaacttgatttgtcaaaagatttaatggtattacctaatgctccaaatagagtatttgcttgggaaacaggatggacaccaggtttaagaagcttagaaaatgatggcacaaaactgttagaccgtataagagataactatgaaggtgagttttattggagatattttgcttttatagctgatgctttaataacaacattaaaaccaagatatgaagatactaatataagaataaatttagatagtaatactagaagctttatagtcccagtgataactacagaatatataagagagaaattatcatattctttttatggttctggaggaacttatgcattatctctttctcaatacaatatgaatataaacatagaattaaatgaaaatgatacttgggttatagatgtcgacaatgtcgtaagagatgtcactatagaatctgataaaattaaaaaaggagatttaatagagaatattttatctaaattaagtattgaagacaataaaattattttagataatcatgaaattaatttctctggaacattaaatggaggtaatggatttgtatctttaacattctcaatcttagaaggaataaatgcagttatagaagttgatttattatctaaatcatataaagttcttatttctggtgaactaaaaacattgatggcaaattcaaattctgttcaacagaaaatagattatataggattgaacagcgaattacaaaaaaatataccttatagttttatggatgataaaggaaaagaaaatggatttattaattgttctacaaaagaaggtttatttgtatctgaattatctgatgtagttcttataagtaaagtttatatggacaatagtaaacctctatttggatattgtagtaatgatttgaaagatgttaaagtcataactaaagatgacgttattatattaacaggatattatttaaaagatgatataaaaatctctctttcttttactatacaagatgaaaatactataaaattaaatggagtatatttagatgaaaatggagtagctgaaatattgaaatttatgaataaaaaaggtagtacaaatacttcagattctttaatgagctttttagaaagtatgaatataaaaagtattttcataaattccttacaatctaatactaagcttatattagatactaattttataataagtggtactacttctattggtcaatttgagtttatttgtgataaagataataatatacaaccatatttcattaagtttaatacactagaaactaaatatactctatatgtaggtaatagacaaaatatgatagtagaaccaaattatgatttagatgattctggagatatatcttcaactgtcattaatttttctcagaaatacctttatggaatagacagttgtgttaataaagttataatttcgccaaatatatatacagatgaaataaacataacacctatatatgaagcaaataatacttatccagaagtgattgtattagatacaaattatataagtgaaaaaatcaatattaatatcaatgatttatctatacgatatgtatggagtaatgatggaagtgattttattcttatgtcaactgatgaagagaacaaggtatcacaagttaaaataagatttactaatgtttttaaaggtaatactatatcagataagatatcttttaattttagtgataagcaagatgtatctataaataaagttatttcaacatttacaccttcatattatgtggaaggattacttaattatgatttaggtctgatttctttatacaatgagaaattttatattaataactttggaatgatggtgtctggattagtatatattaatgattcattatattatttcaagccaccaataaagaacttgataactggatttacaactataggtgatgataaatactactttaatccagataatggtggagctgcttcagtcggagaaacaataattgatggcaaaaactactacttcagccaaaatggagtgttacaaacaggtgtatttagtacagaagatggatttaaatattttgctccagcagatacacttgatgaaaatctagagggggaagcaattgattttactggcaaactaactattgatgaaaatgtttattattttggagataattatagagcagctatagaatggcaaacattagatgatgaagtgtactattttagtacagatacaggtagagcttttaaagggctaaatcaaataggtgatgataaattctatttcaactctgatggtattatgcaaaaaggatttgttaatataaatgataagacattctattttgatgattctggtgtgatgaagtcaggatatactgaaatagatggaaaatatttttactttgctgagaatggagaaatgcaaataggagtatttaatacagcagatggatttaaatattttgctcatcatgatgaagatttaggaaatgaagaaggtgaagcactttcatattctggtatacttaattttaacaataagatttattattttgatgattcatttacagcagtagttggatggaaggatttagaagatggttcaaaatattactttgatgaagatacagcagaagcatatataggtatctcaataattaatgatggtaaatattattttaatgattctggaatcatgcaaattggatttgtcacaataaataatgaagtattttatttctctgattctggaatagtagaatctggaatgcaaaatatagatgataattatttctatatagacgaaaatggtctagttcaaattggtgtatttgacacttcagatggatataaatactttgcaccagctaatactgtaaatgataatatctatggacaagcagttgaatatagtggtttagttagagttggtgaagatgtatattattttggagaaacatatacaattgagactggttggatatatgatatggaaaatgaaagtgataaatattatttcgatccagaaactaaaaaagcatataaaggtattaatgtaattgatgatataaaatactattttgatgagaatggaataatgagaacaggtcttataacatttgaagataatcattactattttaatgaagatggtattatgcaatatggttatctaaatatagaagataagacgttctactttagtgaagatggtattatgcagattggagtatttaatacaccagatggatttaaatattttgcacatcaaaatactttagatgagaattttgagggagaatcaataaactatactggttggttagatttagatgaaaagagatattattttacagatgaatatattgcagcaactggttcagttattattgatggtgaggagtattattttgatcctgatacagctcaattagtgattagtgaatagataaaaatacgttaaatatatcctcttatacttaaatatataaaaataaacaaaatgatacactacataaagtgttctatctaatatgaagatttaccaataaaaaggtgaactatgatgaatgcacagtagttcacctttttatatttctaatggtaacaaaatatttttttatataaacctaggaggcgttatgaatatgacaatatcttttttatcagagcatatatttataaagttagtaattttaactatatcatttgatacattattaggatgtttaagtgcaataaaaagtcgtaaatttaattctagttttggaatagatggaggaatcagaaaagtagcaatgatagcatgtatattttttttatcagtagttgacattcttacaaagtttaactttttatttatgttaccacaagattgtatcaattttttaagactaaaacatcttggaatatctgaatttttctctattttatttattttatatgaaagtgtaagcatattaaaaaatatgtgcttatgtggattaccagtacctaagagattaaaggaaaaaatagcagttttactagatgcaatgacagatgaaatgaatgctaaggatgaaaagtaagtaatggtagatataataaaaatattaacaaataaaaagtgttatccaaataagaatagctgaaagttatcataattcatgaaactgataatgaaaacgagggagcagatgccaagagacacacaagtattaaatacatataatttcgaagcaagtgttcattactatatggatgacaaggtagtatatcaaacattggttcacaaagatggtgcatggtcagttggtaaaatctattaagctacattagttacagatatcacaaactataatagttaaacatagaaatatgtgtaaattgtgatggaaattattcaaaaacacaaaaatacgtgatgaaggacaaaatgatagagaaaataagtatcaaaccttaataaatgatttaattgatagtttaaaagttataggaaaaatatataaagaaataaaaacattaaaaaaatataagatatgtttacaaattactatcagacaatctccttatctaatagaagagtcaattaactaattgagtatctttaaattgaaatgttaggaagtgatttaaatatgaaaacttaaattataaaaaatcaatattaatttatctttaaaaaatagaaaggagtgtataagatttattttcaaagtttaaaaacaagaaaatcaatttaaatttcagaaggaataaatgtggttatagaagtggatttattatcaaaaataatagtactaggaggtttttatgtctttaatatctaaagaagagttaataaaactcgcatatagcattagaccaagagaaaatgagtataaaactatactaactaatttagacgaatataataagttaactacaaacaataatgaaaataaatatttacaattaaaaaaactaaatgaatcaattgatgtttttatgaataaatataaaaattcaagcagaaatagagcactctctaatctaaaaaaagatatattaaaagaagtaattcttattaaaaattccaatacaagtcctgtagaaaaaaatttacattttgtatggataggtggagaagtcagtgatattgctcttgaatacataaaacaatgggctgatattaatgcagaatataatattaaactgtggtatgatagtgaagcattcttagtcaatacactaaaaaaggctatagttgaatcttctaccactgaagcattacagctactagaggaagagattcaaaatcctcaatttgataatatgaaattttacaaaaaaaggatggaatttatatatgatagacaaaaaaggtttataaattattataaatctcaaatcaataaacctacagtacctacaatagatgatattataaagtctcatctagtatctgaatataatagagatgaaactttattagaatcatatagaacaaattctttgagaaaaataaatagtaatcatgggatagatatcagggctaatagtttgtttacagaacaagagttattaaatatttatagtcaggagttgttaaatcgtgggaatttagctgcagcatctgacatagtaagattattagccctaaaaaattttggcggagtatatttagatgttgatatgcttccaggtattcactctgatttatttaaaacaatacctagacctagctctattggactagaccgttgggaaatgataaaattagaggctattatgaagtataaaaaatatataaataattatacatcagaaaactttgataaacttgatcaacaattaaaagataattttaaactcattatagaaagtaaaagtgaaaaatctgagatattttctaaattagaaaatttaaatgtatctgatcttgaaattaaaatagctttcgctttaggcagtgttataaatcaagccttgatatcaaaacaaggttcatatcttactaacctagtaatagaacaagtaaaaaatagatatcaatttttaaaccaacaccttaacccagccatagagtctgacaataacttcacagatactactaagatttttcatgattcactatttaattcagctaccgcagaaaactctatgtttttaacaaaaatagcaccatacttacaagtaggttttatgccagaagctcgctccacaataagtttaagtggtccaggagcttatgcatcagcttactatgatttcataaatttacaagaaaatactatagaaaaaactttaaaagcatcagatttaatagaatttaaattcccagaaaataatctatctcaattgacagaacaagaaataaatagtctatggagctttgatcaagcaagtgcaaaatatcaatttgagaaatatgtaagagattatactggtggatctctttctgaagacaatggggtagactttaataaaaatactgccctcgacaaaaactatttattaaataataaaattccatcaaacaatgtagaagaagctggaagtaaaaattatgttcattatatcatacagttacaaggagatgatataagttatgaagcaacatgcaatttattttctaaaaatcctaaaaatagtattattatacaacgaaatatgaatgaaagtgcaaaaagttactttttaagtgatgatggagaatctattttagaattaaataaatataggatacctgaaagattaaaaaataaggaaaaagtaaaagtaacctttattggacatggtaaagatgaattcaacacaagcgaatttgctagattaagtgtagattcactttccaatgagataagttcatttttagataccataaaattagatatatcacctaaaaatgtagaagtaaacttgcttggatgtaatatgtttagttatgattttaatgttgaagaaacttatcctggtaagttactattaagtattatggacaaaattacttccactttacctgatgtaaataaagattctattactataggagcaaatcaatatgaagtaagaattaatagtgagggaagaaaagaacttctagctcactcaggtaaatggataaataaagaggaagctattatgagcgatttatctagtaaagaatacattttttttgattccatagataataagctaaaagcaaagtccaagaatattccaggtttagcgtcaatatcagaagatataaaaacattattacttgatgcaagtgttagtcctgatacaaaatttattttaaataatcttaagcttaatattgaatcttctattggtgattacatttattatgaaaaattagaacctgttaaaaatataatccacaattctatagatgatttaatagatgagttcaatctacttgaaaatgtatctgatgaattatatgaattaaaaaaattaaataatctagatgagaagtatttaatatcttttgaagatatctcaaaaaataattcaacttattctgtaagatttattaacaaaagtaatggtgaatcagtttatgtagagacagaaaaagaaattttttcaaaatatagcgaacatattacaaaagaaataagtactataaagaatagtataattacagatgttaatggtaatttattggataatatacagttagatcatacttctcaagttaatacattaaacgcagcattctttattcaatcattaatagattatagtagcaataaagatgtactgaatgatttaagtacctcagttaaggttcaactttatgctcaactatttagtacaggtttaaatactatatatgactctatccaattagtaaatttaatatcaaatgcagtaaatgatactataaatgtactacctacaataacagaggggatacctattgtatctactatattagacggaataaacttaggtgcagcaattaaggaattactagacgaacatgacccattactaaaaaaagaactagaagctaaggtgggtgttttagcaataaatatgtcattatctatagctgcaacggtagcttcaattgttggaataggtgctgaagttactattttcttattacctatagctggtatatctgcgggaataccttcattagttaataatgaattaatattgcatgataaggcaacttcagtggtaaactattttaatcatttgtctgaatctaaagaatatggccctcttaaaacagaagatgataaaattttagttcctattgatgatttagtaatatcagaaatagattttaataataattcgataaaactaggaacatgtaatatattagcaatggaggggggatcaggacacacagtgactggtaatatagatcactttttctcatctccatatataagctctcatattccttcattatcagtttattctgcaataggtataaaaacagaaaatctagatttttcaaaaaaaataatgatgttaccaaatgctccttcaagagtgttttggtgggaaactggagcagttccaggtttaagatcattggaaaataatgggactaaattgcttgattcaataagagatttatacccaggcaaattttactggagattctatgcctttttcgattatgcaataactacattaaaaccagtgtatgaagacactaatactaaaattaaactagataaagatactagaaactttataatgccaactataactactgacgaaattagaaacaaattatcttattcatttgatggagcaggaggaacttactctttattattatcttcatatccaatatcaatgaatataaatttatctaaagatgatttatggatatttaatattgataatgaagtaagagaaatatctatagaaaatggtactattaaaaaaggaaatttaatagaagatgttttaagtaaaattgatataaataaaaataaacttattataggcaatcaaacaatagatttttcaggtgatatagataacaaagatagatatatattcttgacttgtgagttagatgataaaattagtttaataatagaaataaatcttgttgcaaaatcttatagtttgttattgtctggggataaaaattatttgatatccaatttatctaatactattgagaaaatcaatactttaggcctagatagtaaaaatatagcttacaattacactgatgaatctaataataaatattttggagctatatctaaaacaagtcaaaaaagcataatacattataaaaaagacagtaaaaatatattagaattttataatggcagtacattagaatttaacagtaaagactttattgctgaagatataaatgtatttatgaaagatgatattaatactataacaggaaaatactatgttgataataatactgataaaagtatagatttctctatttctttagttagtaaaaatcaagtaaaagtaaatggattatatttaaatgaatccgtatactcatcttaccttgattttgtgaaaaattcagatggacaccataatacttctaattttatgaatttatttttgaacaatataagtttctggaaattgtttgggtttgaaaatataaattttgtaatcgataaatactttacccttgttggtaaaactaatcttggatatgtagaatttatttgtgacaataataaaaatatagatatatattttggtgaatggaaaacatcgtcatctaaaagcactatatttagcggaaatggtagaaatgttgtagtagagcctatatataatcctgatacgggtgaagatatatctacttcactagatttttcctatgaacctctctatggaatagatagatatatcaataaagtattgatagcacctgatttatatacaagtttaataaatattaataccaattattattcaaatgagtactaccctgagattatagttcttaacccaaatacattccacaaaaaagtaaatataaatttagatagttcttcttttgagtataaatggtctacagaaggaagtgactttattttagttagatacttagaagaaagtaataaaaaaatattacaaaaaataagaatcaaaggtatcttatctaatactcaatcatttaataaaatgagtatagattttaaagatattaaaaaactatcattaggatatataatgagtaattttaaatcatttaattctgaaaatgaattagatagagatcatttaggatttaaaataatagataataaaacttattactatgatgaagatagtaaattagttaaaggattaatcaatataaataattcattattctattttgatcctatagaatctaacttagtaactggatggcaaactatcaatggtaaaaaatattattttgatataaatactggagcagcttcaactagttataaaattattaatggtaaacacttttattttaataataatggtgtgatgcagttaggagtatttaaaggacctgatggatttgagtattttgcacctgccaatactcagaataataacatagaaggtcaggctatagtttatcaaagtaaattcttaactttgaatggcaaaaaatattattttgataatgactcaaaagcagtcactggatggaggattattaacaatgagaaatattactttaatcctaataatgctattgctgcagtcggattgcaagtaattgacaataataagtattatttcaatcctgacactgctatcatctcaaaaggttggcagactgttaatggtagtagatactactttgatactgataccgctattgcctttaatggttataaaactattgatggtaaacacttttattttgatagtgattgtgtagtgaaaataggtgtgtttagtggctctaatggatttgaatatttcgcacctgctaatacttataataataacatagaaggtcaggctatagtttatcaaagtaaattcttaactttgaatggtaaaaaatattactttgataataactcaaaagcagttaccggatggcaaactattgatagtaaaaaatattactttaatactaacactgctgaagcagctactggatggcaaactattgatggtaaaaagtattactttaatactaacactgctgaagcagctactggatggcaaactattgatggtaaaaaatattactttaatactaacacttctatagcttcaactggttatacaattattaatggtaaatatttttattttaatactgatggtattatgcagataggagtgtttaaagtacctaatggatttgaatactttgcacctgctaatactcataataataacatagaaggtcaagctatactttaccaaaataaattcttaactttgaatggtaaaaaatattactttggtagtgactcaaaagcaattactggatggcaaaccattgatggtaaaaaatattactttaatcctaataatgctattgctgcgactcatctatgcactataaataacgacaagtattactttagttatgatggaattcttcaaaatggatatattactattgaaagaaataatttctattttgatgctaataatgaatctaaaatggtaacaggagtatttaaaggacctaatggatttgagtattttgcacctgctaatactcataataataacatagaaggtcaggctatagtttaccagaataaattcttaactttgaatggcaaaaaatattattttgataatgactcaaaagcagttactggatggcaaactattgatagtaaaaaatattactttaatcttaacactgctgttgcagttactggatggcaaactattgatggtgaaaaatattactttaatcttaacactgctgaagcagctactggatggcaaactattgatggtaaaagatactactttaatactaacacttatatagcttcaactggttatacgattattaatggtaaacatttttattttaatactgatggtattatgcagataggagtgtttaaaggacctgatggatttgaatactttgcacctgctaatactcataataataacatagaaggtcaagctatactttaccaaaataaattcttaactttgaatggtaaaaaatattactttggtagtgactcaaaagcagttaccggattgcgaactattgatggtaaaaaatattactttaatactaacactgctgttgcagttactggatggcaaactattaatggtaaaaaatactactttaatactaacacttatatagcttcaactggttatacaattattagtggtaaacatttttattttaatactgatggtattatgcagataggagtgtttaaaggacctgatggatttgaatactttgcacctgctaatacggatgctaacaacatagaaggtcaagctatacgttatcaaaatagattcctatatttacatgacaatatatattactttggcaatgattcaaaagcggctactggttgggcaactattgatggtaatagatattacttcgagcctaatacagctatgggtgcgaatggttataaaactattgataataaaaatttttactttagaaatggtttacctcagataggagtgtttaaaggacctaatggatttgaatactttgcacctgctaatacggatgctaacaatatagatggtcaagctatacgttatcaaaatagattcctacatttacttggaaaaatatattactttggtaataactcaaaagcagttactggatggcaaactattaatagtaaagtatattactttatgcctgatactgctatggctgcagctggtggacttttcgagattgatggtgttatatatttctttggtgttgatggagtaaaagcccctgggatatatggctaaaatatatgtttgacaaaaaattattcctgtgatactcagaaattatttttatataataaatattgagatttaattaaaagtcatgtgttattgtaatacatgacttttagttaaaatttttctatcatttaataatctattattcttgactattttataataaaattcatatatggaaatattaatactaaataattaatagttgatagaaaatagataatatgctaaaagcaaaaactaatttagagccttgtaactgtttatttgcaattataaaaacatctttaaacatattgactataatataaaatattaactataatacaaaacaatattaattaattttctctacagctatccctggtatggttatttttccacccatagttgattcataagttatagttccagcacttatacctcttatagttatgtaatcatcctctaacactcttgaaggagttattgattttttataactacatagtacgaccttatcataatttccagacacagctaatcttatttgcacctcatcaccatcttcaataacttgaataaccttaccttcaaattttacctttttgtacttataatcatcaggtgttctagctaattggtcataagtaataccagtatcatatcctttcttctcttcttcttcttttttacgttgttcttcagcctttttagcttcttcagctttacgttgattttcagcttcaatagctttcttttcgtcgtctttcattttgaaccatggttcagcatcagacaatttgctatttaaagtttctatttctgttttttgagaatctataactgatgtttgattagaaatgacctcctcatggtcttcagaacaagctggtgaggatatattgccaaaaaacacaccaaaataaatgccagtagagcaatatcctttgtgctcttaaagaatttaattattttcttagagcttccttttctttcattactaaattcgttaccctcattttttttagaaaacataatacaatctcccttttattagatatattttattttaaaatttaaaaacttaaaataactagttgactaaaaattatatattcatattttcctaaaatatatttcccctaagcataattttacaaaataaatcaagaagattcaatatattttgaaaaatgaggtaaaaatgtcagattataatataattttcttgaaggtgaattttatatattaaatgaaacataaagtattttatttgtataaaactatattatgatgtaattaaatgattcagtactttagaggtggtaaaatatagatagatgaaagagcataaataaagtgatataataaaaaattaaatattaactataataaaaaaatatctggtactaagtataatacaaaaataatatatcagaaagaaggtgaagtatgggagaactacaaaaaattccaggggtagggaaagcaacagaaaaatctttaatcatgttaggatatacaactattaaatcacttaaagatgcaaacccagcacaaatgtatgaaaaggaatgtttaatgcgtggacagcacatagacagatgtcagttatatgtatacagatgtgcagtatattttgcatcaactgaaaatccagaaccagaaaaattaaagtggtggtattggaaagattaaaaaatcaaaaaagttagatataaaaaagagttgaatatccgtttaaataataaaaactaatactcaactcttttttagtcgtaaattttatgtaaatctatttgtatggctaaatatacccatcaataaatgtataaatataccaatcaataaatgactaaacatactacctaacaaaggattaaataaattacttaacaaagcattctaaaacaattaattagaaactgtttcttcaagccattttctacattgcccaatatttaccatagggtcaaagccttggtcttttcccttatttaaaagcatatcacaagggaaagtatcacattcaccacaatgattaagttccttactttcacagcaagttttaaccttacattctccaccccaaaatggtttttccatagttgggcaaccagtgcaatttacttgttctttttttgtacaactgtcacaacagacaccacatcttgattcaaacatgttcaaacatcctttccattatttaaaaatattataaaatgattttagatgactacaaaagtgcaaatagttgattttaagtcatctaaatgttaaacataaaattattaatactggtaaatttataaaaactattccaaaaatatttttgaatatttcaaaacacaataaattacttcaaatccctttgaatattccataacactatagattactttaaatccccttgaatatatttcacagcattatagattgctttaaatctctttgaatatttcataacactatagattactttaaatctctttgaatattctacaagactatagattagtttaaattcctttgaatatttcataacatcataaattagtttaaatctctttgaatattctacaagactatagattagtttaaatccctttgaatatttcataacactatagattactttaaatttctttgaatattctacaagactatagattagtttaaatccctttgaatatttcataacaccatagattactttaaatccctttgaatattctataacactataaattacttttaacttttatataaccataaagtttttatctggcactttaaatggagtttttatatcaaatttgccttccatcgaataaccaaacttaatttaattacacattccaagagtcaaatattcattcaatatatttgataattctatgttatagccataattaaatatagattattaaagttaaatatttatttaatgtattgaatgattttttagctatatttaattaagtttcattatataatataaaaattgtttttgcattaagttttaatataacacataataattttaaataataacattattatatatttttttattttaggagtatatctattatatagtgagtagataaaacatataaaattcaaataaaagatatatatttttaaataaaagggatataaatttcaaaccaaaaagaatataaatttcaaaccaaaaaatatctagcatttaccattaagaaataacatcattctttctaaaatttctattggcaatttcagaaaatactatagtagtaataaatgcaacacatattgtaactatagtgtcattaacatttaaagcagattgctttataacccccatagcactacctaacatagaataagggaaaaatataccaacagcaggttttgctactattaatcccataccaaatagagaaaggcaaagactaataccaataggagttgcaaaacttctaatctttatagacatgtataattgtatagaagctattgaaatagaaataatccaacctttagcaatccaaccagtcaattctttaggtacactaccagaaaaaccaaacatatttcctgcaactatataaaagataacaaagaaaacttgtgtaatagctgtaagtattgaaactactgtaagtttagataaaaagatattttttaaattaactggcagtgtcattacattattccaattatgattcatatgttcaagcctacaaatatatgcacaaaagattgcgattaagataggaaagaaaaattccccataaaaaagactaacttgagtccataagctgtaccattcttttttgagtatgccttgatttagataaaaattaccagaaccaatcaacacacttataagtggcaaagctaataatacataccatataaaagaattttttaactttagaatttctcccaaaactgacttccttaacatttaaatccctcctatacttctttttttaataaatgatttcttccaatataataaattagcattccaattaagaaaactaaaatcgtaatagaaaaattcatatcaattctatagacagatgaacctaaaacattatcataagcataacttaaaggtgataactctaggtaataagaccatataaacaatctacgaataccttgataaaacaaacctgatgtcaaacctataaaactaccaatcatgccaaatgtaattgcaatcatttgatttggaattacagttgcaatccataggtgtagtgcaatgatagcaatacttacaagaattgttcctaatgtgtattttaaaagtaaagatacagaaattgactcaataacccctctaaaatgtccaaacaacacaatagataacacttgcatcaatataggtatagataccaaaatagcagaacataaaaatttggataaataaatactatttaaagatgtcacagaagattttaaaagcttccatgtatctcctttatgttctatatcgcttatgcgtgatgtaattattgatattaagataggaaagaatagaccatttaaacttgcaaaactcataagcatataggaatattcaaatccacctaacatatctggattacgtgtaatagccctatttgaatttacgatacaccacattatttcaacagctacaaataaaaaggtcatcagaataatcttctttcttttaagtttataaaattctagaccaaggtatttcattataaagtcaccgccttaccagtaagttctaggaatatatcttccaagctttttttatgttcttctattctaaatacatctatatttgaatggacaagcataccatttattttagccacatctgagtcttttaaattttcaatagtcaagtacccattttgtataagtgacatatatcctttagtatttaatagcttttgtgcagatacaacattcttagctttgatagcaatctgactttgacctctattatgaagttcttttatgctatcttgaaaaaccagttcgccatgatttattattcctattgatgtggcaatttggtcaatttcacttaaaagatggctagagattagaacagtcatgccgtatttttctggtagagattttattaattctctaatttcctcaatccctgctgggtcgagtccatttgtaggttcatcaagtattaataatttgggaaacttcattattgccatagcaatgccaagacgttgcttcatacctaaagaatattgattaacttttttatttttttgattttctaaccttacaatttttaatgcttcatttacattttttttaggtaaatctaagagtctttgcattatggtcatgttttcaagccctgtaagatgaccatagtatgatggagattctatcaaagaacctatatcttttaaaattgatattctatttttttcatttaactctttacctaaaatattaatatttccttgtgtgggtttagcaagtccaagaagcattttaagagtggtagattttccagctccattaggacccaaaaaaccatatacagctccttgtggaactcttaggtctatatcctttactctaaatattttattgtattcctttgaaagtctttgtgttctaattatcatttccatatgtttcatccccttttttaatctgtgcttattgattcttttaacttatatcagtataataacttggttacatttcagttagctgaagtttaccttacaataaccttaaaagtctatttaggcaaagttgtgaaaatgggtatatggtatactaaaggagggtgatgattatggagtcaataaaagataaaaaaatacttgtggttgatgaccacaaggaattattaaaaatgatagatgaaatcctaagaaaagagggatttagtagagtatttttagcatcaagttatgaagaagctgttagggtatttagaaatgtaaagccagattgtgcaattttagatgttgtattgccagatggagatggtttctctattatgagaaaaattagagagacatctaagataccagttatttttctctctgcaagaggtgaagatgaagatagattgattggtttgggattaggggctgacgattatatagtaaagccatttttaccaaaggaacttactttaaggcttgtgggtatattaaatcgtgtatatgtgcctatagaagaagaggagttgccagtatttaaactgggagattctgttgttgtgaatttaaatagtgcatgtgttgagaaagatgggcaagagatttctttaacagctaaagagcattcgttgcttttaaagttgtatgaaaataaagggagaattgttactaatgattcactatgtcaagccatttggggagatgatatgtatggatatgaaaatacccttatggttcatgttagaagggttagagagaagatagaaaaaactccatctacacctaaacatcttattacagtaagaggtcttggatataagttgatgattaattaattttagatattagaataaaagaaatcaagaggagtgatttaattttggatagtgtaaagtacatattgaggcgatttataggttcaagtatcttgatttcattactttttattgtattaaatatagcaggttttcttctgttttcatatatgctatttgtatctaaatactctgataatttagatacaagtgatagcagagaaataaaatcaaacttgattatgattgaagataatttgattttaaaagatggaaagtttattttagatgattctagtaaggaagtactacataaaaataaagtttgggcaatgttaattgataacaatggagatagaatatggggatttgatttaccaaaagaaattccaagtcattatactttgacagatgtagcaaagttttcaaggttctttttaaaggactatcctgtgtatgtatgggaacatccaaatggaatattagtaacaggttatccaaaggacaaatacactaaatttaaccttacttatacgattaaggaaatagaacaatttcctatgttaataataggtatgtttctggttaatgcaatagttacttttttaatagctctattcataggtttaaaaatggtgaaatctataaaaccaattattactggcataaagcttatgtcaaaaggagaaccagtacttttacaagaaaaaggaatactaagtgatatttcaaaatctattaatactgtatctaaagagttgcaaatgaaagatgaaaaacttaggaagaaagaggaagctaggtctaactggattgcaggaatatctcatgatataagaactccactttcaatgataattggatatgctggagaacttgaagaaagcagtagcctttcaaatagagaacaagagcaagtgtctattatatgcaatcaaggggttaaaatcagagaattagtaaatgacctaaatttagtatctaaacttgaatataatatgcaagcattgaattgtgataagattagagtttctgcgtttttgagagagcttatttctgagtttataaataataatttggataatgacttttatgttgaacttgatatactaaatgaagatattattatagatgcagataaaaaattattaaaaagggctattagtaatttaatacaaaatagtataactcataaccaacaaggatgtaatataagggttacctctaagtctgatttagatttttgctatataattgttgaagatgatggaaaaggtatgagtcaagaaagaattaatagtttattaaagagccaaaatggactaagtgaggcatatgccaaaggtcaaaatcatggtctaggtattttgatagtagctggaattattaatgcacatagaggtaaattagatattatgagtattgatagtcagggactaaaaacaatactaaaattacctctaattaagtgatattttataaaataataacagataagaatgaagaatgaagaatgaaaatattttgaaaataattttattctttattgacaaaataactctattagagtagaataaggataaattcttttcttgtcaagttttattaaagtaaagagtaacttgtgctttatgcgcttatggctgagttactcatggtatcaaaattttcatagaaataatattttggaattattgtaaggttattaaattctttagataattccattttttttattttttagttaatatttaattttattattgacaaaaaaattctactaaaatagaattatggtatagtgttttttaattttaagaaaaaatataatgacatcctaaaaaagttttaattatacgttgttctgtgtagttataatagcttctatgtaactattgtaagtatattttattataattatttatttaaagtacgataaatgttttaaattgaagtattttgcaccattgagttctactaaagtagagtttttgtgtagtatttttagaaataacatatatatatatgtatttatgttgaaatatatgggaaatttataatataattaatgaaaaaatttaaattttgtaatatataaataaaaaaactctaaaatagaaggatataattatatagaatgtttcaattaaacaaggcaaaaactataatcttaaaattaaaattaacattattcttaagaagtaagaaatttaagaagtaaaaagtttagtgataagtggtagtaagcaagaaatttagaaagtaggaagtttagtgataagtggtagtaagcgagaaatttagaaagtgggaagtttagtaataatttgtagcaagtaagaaatttaggaagtaggaagtttagtaataatttgtagcaagtaagaaatttagggagtaggaagtttagtagtaataatttgtagcaagtaagaaatttagggagtaggaagtttagtaataatttgtagtaagtaagaaatttagaaagtaggaaatttagtaataatttatagtaagtaagaaatttagaaagtaggaagtttagtaataatttatagcaagtaagaaatttagaaagtaggaagtttagtagtaatttatagtaagtaagaaatttagtaagtgagaagtttagttataatttatagtaagtaagaaatttagtaagtgagaagttcagtaataagttgtagtaaatgaaaagtttaggaagtaggaagttcagtaataagttgtagtaaataaaaaatttaggaagtaggatttactgaaatacaaatatttaaaatcaaagagtttaaaagaaaggagagctactggacaagtatccaaaatagatagctgagtacaaaatatctcataaaattaagcaatataatacaagagaattttgacattatttatatatatttaccgtgtacaaatagctaaatttaggattaagattgaaaaatatcttataagtctgagcttatataaatccgtataagatgtatttaatcgaaaaattttattatggatattgcttgtctatattctgagtagcaaggttttatcatgactataaaaaagttgccacaatcagaattaaagataatgaaatttatatggaaatcagattccaaagtaacatctagagatattgttttaggaatggagcaaaaatatcaatggaaacaaacgacaactttgactcttttatctagattagtagtaaaaagatttctaaattctcaaaagatagataaatatacacattatgaagttttaattaaagaaaaggaatacataggagttgagacaagagatttttttagaaatattcatgattcttctataaaaagtttattgttgtcattacatgaaaatattaatttgagcaaagatgatatcttacttattgaagagtggataaaaaatctaaaagaagaggagaaagacgtataagcaaacgtatttcttatagcattaatataaagtgtatgtaagtgtatttatgtaatatattagtctacttaagtaatatgacaaatgattataagtggattatgatactataatgtgaatctaaataaattaaatataaattgatagtggatattctatttaattaaatttaaaaagctacctttacttataagtataattaaggtagctttttaaatagaggtagtgtgattaaagagaatttttaaatataaattgtgaagctttaatatagatgacaatatatattttgcaaatatgacacagtgttttcgtatttaagatgataaaataaataggaattaatgaagatatttaaaaaataaaaataaagaattaatagaagatattaaagagatagagataaaagtgttaatagaagatattgaaaaagtaaaaataaaggattaatagaagatactgaagaggtagaaacaaaagtgttaatagaagatattgaaaaaataaaaacaaaagattaataaaaggtactgaagagatagagataaaagtgttaatagaagatattgaaaaataaaaataaaagattgatataatatactgaagaggtagaaacaaaagtgttaatagaagatactaaaaaagtaaaaataaaggactaataaaaggtactgaagagatagagaaaaaaatgttaatagaagatactgaaaaaatagaaataaaaaattaggaggaaaatttatgaaatatcaggtttcattattagcagtgaaggatattgaagtatcaaaaaaattttacaaagaattatttgagcaagaaattgaattggacttaggcaaaaatgtaacatttaaaggaggatttgctatacaagaagacttcgcatggcttacagggattaatccagatacaattatacaaaaatcaaataatatggaactttattttgaggttgatgattttgacgaatttattgaaaaactcaattattataaagatgtagagtttgtccataagccactaaaacatgaatggcaacaaagagtagtgcgtatttatgacccagataagcatattattgagataggagagtctatggaagttatagctagaagatatttatctgagggatactctgtagaagaaacttctaaaataattcaacatccaattgaatttgtaaagcagtgtgaaaatagtaaggaatgattgtttaaattataattatttagtagaaattaattgtagtggaactaattcaagataatatataggactagtatttgacaaatgtcataaattaaattaaaataaagaaaatattaataaagaaaaataaggggaatattaataaagaaaaaataaatataatattaaaatatattaataaatttgaatatttataatatttttaatttgaagtaggaatacttaaacgtataaagtttattatcggaaatttctatattaatatgtagtaattcaatattattataaaggagtggttattattaaggcaattgaactttataaaaaattagatttagaatttaatattaaaaatattaatgatgattggagttttatgaattttgaaaatgattttatcactccagaatttagaaaaaagtacatatgattagtattagataatgctcaaaatattaataaagtatacacaactacttttcctgataaagaaataattaagcaagttatagataaagatgaaaaagatattttaattttttcacatcacgcaatgggatacatagcatcagatgaaggttttccatttcacgacataccactatcttatatggaagagatgaaaaatcgtagaatttctttttatgtattacattctccactagacaactatagtgactattcaacttctgttagttttgcaaaagctatgggtttagaaatagtcaaaccattttgtaaatatgacgataaaattgaggtaggagttatatgtaaaacatcactaaaatcaatagaagagattaaggaattaattaaaaaatctgttggtcatgatgtgaaattgtatgattatggagattctgtattaaaagatggtttagttgctattgcagcagggggaggaagttatccatttgtagcaagagaagttgctgaacttggtataaatctatatattactgggtttactaagcctttaaaacattttgaaccagtattagagttccatcaaatagcaaaagataatttaattaatgttataggtgctactcattattctacagaaaaatttgcgtgtatgggcatggttgattattttaaaaatctaggtttagaatcagagtttttgcaaggaaaatattacttagaggatttataggacatattaaacaataaaaataaacagttagtaaaaatttattttactaactgtttatttttttacctatttatccagtgttttgaaaaaatctatctttattttttaaactaagaaaatagacttttaattgttgattagaagatttagttttgatgtcttttaaattatttttcgatattttttagtttattttttgatgtattttagattattatttaggattgattagaatttataaatatttattttagattattgtaaatatttatttaaaaaaaatagaattattatatttatgataataaatggtataataaaaggtaaagtgtcaaatatgcactaaattaaataagttaattagtatataggttaaagtggaagtaattaaaacttattaagtattagaaaatgacttcttattagagtaagtatctaaaatgatataaaaattatgattactcattaaagtgactattatagagtagataaaattgcccataaaaatagctataatagagtggataagattactcattaaagcaattactatagagtagataaaattactcactaaaataactataatagagtggataagattattcattaaagcgattactgtggagtagataaaattactcactaaaataactataatagagtagataagatactcattaaggtgattattgtagagtagataaaattacccatcaaagttaattatcacatattagataagattattcattaaagttactatcacagagtggataaaattacacattaaaattgtctgttaaagaatgaataaaaaagagattgctcaatataagaagcatataaaaaatcaaacatataaaatttaataaataataactgatagggaaaggaaagatagaatgatatttacaaaaagcaataaatacgataaggactttctcatgaaaaatatgatgggacctaattgtataaaaatattggaagaattaacaagtaagataaaactagaaaagggaatgcgtattttagacttaggttgtggtaagggtatatcttcgatatttttagcaaaggaatttgatgctactgtatttgcaacagatttatggatagaaccaactgaaaactataaaagatttaaagagtttaaattggatgataaaatatttccaatacaggcagaggcacatgaactaccttatgcagaaggtttctttgatgcggtgataagtatcgattcttatcactattttggaaacaaagaaggatttttagacaatcatatatcacctcttgtaaaagaggggggaatacttgctatggcaatgcctggattaaaagaagattttgtggattgtataccagatgaactcattccattttggcaagataatatgaacttccattcaattacatggtggaataaactttggtctgaatcggagtctgtgattgtagagaaatgtgaagctttaaattgtcatgatgaagcttggaaggattggataaattgtgataattcatatgctataaatgacaaaaaaatgatggaagtagagaatggaaagtattttaatacaatttctttgatagcgagaactaaataattgtgatgaatttataaaagtataagataagtagaaatataagttgaatgagagtataagaagcatagaaatataagttgaattaaagtagaaggtaaataaaaatgtaagttaaataaagagtttatacaaaaatgattttttagattatttatacccaatcgagttgcttaggtcagttgggtatttttatttttttaaagttaaattgcaaatactattgtgtgatatatattttaatactaaatgtttgttttataagaaataaactaatagaaaaaatagttttaacaatgaaagcaaaaaaggtattgatgaagattaaaaattttatagtaccattttatatatttttttatatattttattatactttaaatcaaatttcaaaatgattaagtatatatacccaaaagattaaagaactatatttattatactattaaaaattattttaatagagatacaagagatagatatattggttttaattttatagaaatatacaaagatattttaagctaatatatagtaatttatatagcattataaactagaatcatataaaataagttaactacaatcataaattaaaaaggagaaatgttaagttgatagaaggaataaaatttataaaggcagaagaaaagtatatttattcgtattggcaaacttttgataaaatagcaaaagagaggaaatatctagctatggatgaagcctttccttttgaagaaacagttgaatttataaaaaatactataaataaaaacttaccacaactgtttataattgatttagaatcagataactgtattggttggtgtgacgttttacctaaaactgaaaaagttggttatttaggcatgggtattcttaaagagtatagggaaaaaggtatcggaagtagtcttttaaaacaaattattgatttatcaaaagaatatgggtatgaaaaaattgagcttgatgtatttaaaagtaatagtagagctattcatgtttataaatctttagggtttgtagaggtaaatacaatatctagtggttttacatggaatgatagacctgtaaaagaagaagtaattcaaatggagcttacacttatataaaataaagttaaagtctttaaaattccatatacacttgtataaaataaagttaaagcccttaaaattccatataaaagaaatatttttaagggctttttaataatggttcttttgaaggtagctaaatatctaaaattttatatattaaatttaaagaaaatataaagatggaagatacaaccatgtttactaataaaaaaattaaagtcataaataataaactcataaacaacttattattacttatgtttattttgcatctattacttcatgagccattttaactaagtcattcatagataaatttgagtcttgaactgtaaaagaatagtaaactccatcttgtttccatgtcaaaaacttaaattcattaacttcaactttgtctgattcattatttggccctacactaaatgtgtatttgcctgatttttcatcaattttatcctgttctgtcattttataaccttctggtacaaacttttgtgcgaatgcttcataagaaatattaatatctttgtaagtatctacaacttttagattgtcagaactcttctcaagtacattatttgctgtgtcaagagatatttcatcattgccatttttatattcaaaactaagtgcttttgattttcctaaaacattattttctttgtcaagtgcttttttatttacagtatatgctcctttaaatttatatccattactaaattcagaaactatattaggggtaaagttaaagtctttttttacttgttctgtagttgggatagatgtataggtagccttagtacttgattttccaactaaactatatatatgtcctactgcaagggctgttgtgctcaatatcaaagtaatggctaaagttgcaactaagccttttctaaatggtaatttgtgtgttttattattaatcattttataattttcctctctttctggtaaactatttagtgttttacttaaactattatgaaaactttctggaacttctggaaacgaattatttaatatatttttattcatatgattacctccgtgttttctaatttagtttttaataatgttcttcctcttgataatctactttttacagttccttgaggtatatctaatatttccttaacctcatctactgaataaccttcaatatagtaaaggactattggaattttaatttttttaggtagactttgaatagcagtatacaaatcgctatagtcatctttttcatcaatttttttgtttttgaagacatcttcaaatgatagagattttaatcgtttgcgtcttaatgaattacattcatttatgactattctaatcagccatgttttaaagtattgttcttccttaagagaatccaacttttcatatgcttttaaaatagcattgttgacggcatcttcacagtcttggtcgtttcctagaatagacttagatactcgatacaaagtctgttctgattcaagtatattgtttgtaaatgtagttttatccaactgagttccttcccttctatgcaaatcgtagcgctacttttttgcctttcacttattagataaaattttactatagatggttcactttttttatgattatttgataaatttaagtttgaaagttttgcctattctatacaaatattctataatatatttttttctagtattttcccctcatatataaagccatgtagatatattaaactttagaagccatttatatatttagttttatagtaagtgtttatattaagtaattataaaatagtaagtatttgatgttgagtagttagaaaataatgcttttggattatttacttcatgtatagatttaaaataagttttttaattaatgactaaagataacggtattttgactaaaagtaggcttttaagaaaaaacaatgaaacttaaatgagaatcaagagttagaaatgtcattattttagatagatatgaacataaataaacttaaaaaatataaattataaaaataataatttttttaaaataacaaagttttttgattaaaagttttatattgaaatgtcaaagtaataaaataccttataagttaattacaggttaaaaaaataatatgtgaattttctgatatttactaattatcaataaagtatttaagtattaatgtttttagtgagactttaagacagataatctcctattaaagatactatatcttagataaaataaattaaaacaatataaaaacataacaagattacagaaagaaagctcataataaaacactaaaaaatttattttaaggaggaataaagtatgaagtttcaagaaatgattaatagcccaggtctttggattgtttctagttttttagtaattatttcagttgttcaagcaatcgtatttatgaaatcagcacttaaagaggcttcaaatcttggtattgaaagaaaaggaattaaagcagcaattcgctcagctagtgttacagcaattggaccctctctatctcctgttattacattattatcactggtagctgtgattggtgctcctacgacttggatgaggctttgtgatgtaggagctgccagaacagaacttggagtaatatctcttacatcaaatttatctggagtagaagtaggtagtgctgcatttggagcagaagctttttcgtatgcactatggggaatggctttaaataacttaggttggttgcttgttgtatttattttgggtcatagaatgcgtggaattgttgaaaaaatgaatgtgaaatataatcctacttgggttaaaaaactacttgcaggggctacagttggattatttgcttaccttctttcaaatcaaataaaaacattcgaaataccaaaacttacaccagcagttatttcagctatagttatgctagtattgacgactttatttaaaaagaatcaacgattacaagaattatccttaggtattgccatgttgattggtatgtttggcacacagattgtactatcatgattaaaacagataagaggtgataattatgtatgataaaaagatgataaaaatagggagaatttctataggtcttgcaattattgcaaattttattcctgcaatctatgtaggtcttcgctttggtcagatgccaatgctttctgttatattccaaatttggggattagttgctacaacttatggagtgagttggattgttcaacctatagcttattatccaacactaggagctccaggttcttatataggttggcttgcaggttctgttggagatatacgtatgcctgcagcatcaatggcacagaaaattgcaggtgtagaagcaggaactcatgagggtgaagttgtaggaacaattggtacatgttgttcaatctttgtatcagcttctatgattactatttttaccattgtaggctataaagtaattcctttgttacctgaatttattactgattcatttaattatatacttccagcattgtttggggcaatttacgttgatattgcgcgtaaagatattcgagctggtggatgtacgattgctgtagcattagctattatgtactttggtgaaaaaattggtataccaggtggattgttgacattgtttattgtgttaggtgggatacttattacaagggttttctttgtaattgatagcaataaaacgaaagaataggattgtttactaggaagaaagactagaattatttgctgagaaaaagaataggattgtttactaggaggaaagactagaattatttgctgagaaaaagaataggattgtttactaggaggaaagactagaattatttgttgagaaaaaagaataggattgtttattaagaaatatgaatataaataagtcttgaaaggagaagaagaatgtttgatgttaaaattgccaatggaataatcattgatggtacaggaaattcaagatataaaggtgatgtagggattgtaggagacaaaatcatggctattggagatctaagtcaaaaagaggctaaagagactatagacgcaactggaaaatttgtatcacctggttttatagatttccacactcattctgatttatctcttgtgtatgacaaatacacaagaagccgtatccatacaggtgtaacaacagacgttattgcaaactgtggtataggagttgctccgataagagaagagaagaagcaggagttaattgactatcttggaacgaggataattggtacaattccaataaaattgaaccttcactggaatacaatgcaggaatactttgattacttaactgaaaattctccagcagtaaatgttgtagcttatgtagcacaaggacctgtacgtatcaatgaaatgggattttcaaaggagccagctactttagagcaacttaaaaatatgaagttggaagttagaaaggctatggaagctggatgtgtagctctttcgtcaggattagtttatttaccaggagcatatacaaagaaagaagaaatggctgaattatgtaaggaattgataccatacaatggatactatatatctcatattagagatgagggtgatgaagaaatggaagctcttgatgaagcaatttatatagctaagacggcaggagttcctctacatatttctcatttaaaagtcatgggtcataagaattttggaactattgataaggtatttaaaaagctagatgaagctgaggcagatggcttggaagttacttttgattgttacccatatacagctggaatgacatctttgggtgcacttttacctccttgggcttttgaaggtggtgtagaaaacatggtaaaacgattagaagtgcaagaaaatagggacagaattataaaagagctagaggaagggattcctggatggcaatgtttctaccagttagcaggtggttgggacggtgttgtactagcctctgtaatgactgaagcaaataaatatgtagagggtaaaactttaatggaggtagctaaaatcaatggtgaaaatccatttgatacgttctttaggcttttgattgaagaaaaaagtaaaattcaagtagttgttcatacacaaggtcaagaggatacagataaggtcgtttgccatccaaagtcatgtataggttctgatagtatggacctttctacagaaggcttactttctcttggaaagcctcatccccgtgcatttggtacttttggacgaattttctcttactatgttagagaaaaaggtatgttgacttttgaggaagcagttaaaaagataacttatctttcagcaaaacgcttaggaatttataaagaaaggggtctacttaaggaaaattattttgctgacattgtggtatttgacccagatacaatagaagataaagcgacttatagtaatcctaaacagtatacagtgggagtggaatatgtattggtaaatggtaaaattgcattggcaggaggaaagcaaactgatgtatgtgctggacgtgtaattaaaaatcctcttagcatagcaaaatagaatacattaagaacttttataaaaatagtctttctttgaatattaaggaaggctatttttgttaaattaataaagattactctacttgtgttttctagagaatttaactttaagtagaaaaaacaatatattaattgtaaaatgtaattaatattaatggataagatttaaatacaaaaacttaaatacaaaaatgttttaacagatagtcataattaaaaaacttaaagtaactttttatataagatataattgattatgcaaaattttatgaagcagcaaccttgttactttaagtcaagggaggttcagaaagtgtcttaagagataatagtatctttaggaaaggagaaacgaaatgaaaatactttatgtaggaccaggcatggtaatcgacaaaatactagcagtaagtaaaaagaattttcccaatattgaagcagattttcttagatatgatagatatattgaagtacctgatttattggaaaaatatagaggtagagtagatgcagttctttttacaggtaaatcgccatttaaattttttgaaaaaagacaaaaagattttgtgttgtctgattatattcctagacatgaaacaacattatacagagtattgcttgaaattacatatttgcttaaattcgatattagtagacttagtatagatacttatgataaagctatgctgaagagattgtataaagaaattggagttgaatttaaggatgaacatatgttttttgcagagcaaaagtatttagaagaggactacataaagtttgtgcttgaatttcataaatataattatcaaaataatgacatatgttgttgtattacaggtcttgaagaagcatatcatgcaatgaaaaaagagaatattccagtagttttagccttgccttctgaggatgtaatggtacaaagtataaaaaacattcagatgcgttatattgcaaagaaaaacaatgagaatcagattgttgttcttgctatcaaacttaatatgccttcagaatattcactgatgaaggaagatgagtacgcttatctttcacaaaggattaagattcttgataaactataccatttcaatagccgtatagatggtgttttggtagagcagagtagaagcgaatttatgatttttacaactaaaaaaatacttgagttagaaacaaagaagtacagagatatttatttgttggatatgattcgtgaagtttcagttataaacacttatataggaattggttatggaaaaacagcaaatgaagctaaatttaacgcttatgagagtattaagatggctcaaagtcaaaaaaatgatgcagcatatgtagtttttgaaaatggagaaattatgggaccactaaagccaaatcctgctgtcaaagagaaaaatagctttgatgaacgattttatcaaattgctacagagacagggctaagtgctaatactgtatataaagtgttcaataaaataataaatagtggaaaaactgaatttacatcaaaggaattagctattatatgtggtgtaagtattagaactatggacaggattatacttagattgtgtgattctggttattgtgaggtagtgagtgaacagcttatgagcaagtatggtagacccagtagaatattacgttttaaaccttttctgttgttttaaatagatataagttaaaaattaaatttttatgataacattttctttacaattttttagatatatgttaatatttagaaaaatgcatatgtattcataaaataaactcaaaatagctaaaaaatcattaaaaaggaaatcgtatgcataaaatgagaaagttaatttataacttaaataaatctgggaggagataattatgggaaaatatcaggattcaaaaaaagttgtaagaaattattttgaagcattagaaaatgctactggggatgaggttgaaaatgtcttaaagcaacatatgaaatcagattataactggaaaggtgtgtatccatttcgtgaacaagaaggcactgaaaatgtagcagatgtattttggaagcctttaaaaaaatcattgagtaatatgcaaagacgacaagatattttcattgcaggaacaaatgagattgacaatagtgaatgggtaatgagtatggggcattttatgggactttttgataaggattggcttggcattaaacatactcgtaaaatgattagtttaagatatgcagaatttaactgtgttcaagatggtaaaattgctaaaactggattatttgtagatataattgggtttatgattcaagcaggagttaatccattgccaccacaaacaggttcatattttgtatatccagggccaattgaccataatggattactttttgaagatgcagatgaagttgaaggagtaaaaactttagcattagtaaataaaatggtagatgatttatctgaattaaatgaaagtggtactatgggatgcccaccagaaatacttaaaaaatcttgggctaaagatatgatttggtatggtccaggtggaattggtgcttcttatactatacctagatatcaagagcaacaccagctaccatttagaaataatttaaaaggaaagactttcaatgggcatgtatgtagatttgcagaaggtaattttgcttgtttctttggatggcctaatctgactaatgtaccatgtggaggttttttaggattaccaggtggagaggttaaagcagatatgcaagttgttgatgtttattatcgtaagggcgataaacttcaagaaaactgggtgttaattgatattccttattggttgaaacaacaagggcttgatattcttgagagaactaaaagtatttttaatgcttagttatgcatacgtattctaaaacaaagggggatataaagtggcatctaccaacaaaaataatgtaacaagtaaagaggaagaaaaagaagtttctacaagtgggcttgaatcatgtacggttaaagaaaacaaagctaaaatgaatcaaactaattttagtaatataaatgaaaatcaaacaaatgagaataaaacgaacacatataaaggaaatatagataaaataaacacaaataaatccgacataaataaagttaacatagatacagtggatacagataaattaaatacaaatactcttactgaaaaaaataaaaaagttatatttaagggggaagataatatgtcatctacaaaaatttactatggagattcattagaagtaacgcctgttggagtaatggattacaatgatttttcaaaacagacaaaaagggaacaggaaatacctggatttgattctaagtatagagattttgtagattatattatgaagattacacataatatctgggaagaaaaaggtataggtgttatttatgatacatatcacaataatgttacaatgcattgtggctcttcaaatttagttggtattaaagatgttatttccaatactcttcaaacattacatgcgtttcctgatagaagattaattggtcaaaatgtaatatggtctaactttggtgctgatggttttttatcttctcaccgtgttttgtctacagcaactaacttaggtgatagtaattttggaccagcaacaggtagaaaaataaactttagaactgtaattgattgtgccacaactaacaatagaatccacgaagaatggttggttagagataatttatggattgttactcaattaggattaaaccctcaggaagtagcaaagagtatggcaaaggcaagtgaatctaaagtgcttagcttacaatcaacttatggtatctgtgaatctatggatggtcaatttatgccaactaagtatcaagcaaaagatgattctgttggcgaaatgatgcttgaaatgacaagccgtatttataattataaatatataaatgaagttaaaaaatactatcatgataatgcagtagtacattttatatgtgataaagatttaaatggttatgatgagattcaaggaatgattgtaagtttacttgcatcaattccaaatggaagttatgaagtggaaagagtaacttgtaatcaaagagaaaaaaatgaaggttatgatgtatctataagatggagattacgtggaataaatgaaggtataggattttttggacagccttctggaaagcatatagaagtaatgggaatcaatcattatcatatacttcaaggtaaagtaaaggaagagtggataacttttgatggtatggatgtattaaaacaaatgtatatgggagtagaagaataaagctgtttagagtataaataattttgaaatgtatatagggaagtattgctttataaaatttaagtggggaatgtatatgaaaaatagatgtttaaacttttagcaaaaattatgactaaatttaaaagggggaattataaaaatatgaaaacaacggttgaaatagaaaatgatatcatattaggaaaagactattcaaacctaaaaagaggaattgcatttttttcaattgctttaatatactttttttattgctacaattttatggtgggtacttttattaaaccaacaatgatttatgctttagcagatgggggatttggcttttcattaaaacaaacagaagaaatatttgcagttatgtcttttggtacaattccaggtacatttatttttggggtgatttctacaaaaattgggaagaagaggactttaattagcgttgctttactgattggattgacaacatttataccaatgttatctcctacagatattatgttatggaaaatagcacgtttgtgtacaggagtagtgttgggaggcgtatttggaacagctatgcctttagttgcagatatgtttccaagtaaatatcgtggtaagttagctgctatattaactgctttattttcattagcaatgatttttggtgggaaagtatatggcgttttaggtgatgcaaattggcaaatattgatgtatactgcgattataccacctatagttggagctatcttagcaatcttctttgtgccagatgatttggagtatacaaaggaattagttaaaaagggaaaagaaactggtgaaaagattagctatataagtatgtataagggaaaatacttatggattggattgggaacgattcttttatcaggtgcaaattttacagcatattcagcattttcaaataatgcaactacatacctagtgacaggaataggaatgtcagcagcagtggctgggtctatatatagtttacaaggaattggtcaattagtaggatatttattctggggttcaattgcagataaatttggaagaaaaataccttttataggtatggcattagcagcagtatttgtttttatatatacaaaattaggtggagataatacaacaacattctatatgatatcagtattactaggtgttgctgttggatattctggagcatggggagcatactacacagagttgtttccaagtaaatatcgttcgttgtcatctggtatgtcatttaatggaggaaggattatatctacgtttgcaatacctgctatagctggtacagcttctggtactttaggtatgatgactatcttttacatatcaatcgcagtctttgtagcaggtgctattgtatggttattcttaccagagacgttaaataataaaaaataaaatactaggaatttattttgttacttagaaaggggtggcttatgatttcatcaattgatgtatgtattataataggatatttgctattaatgttagttattggttattattcaggaaaagataataaaaatcaagaagattatttcttggcaggtaggtcaatgccatggattccaattgctttatcagttgcagctactatgattagtgcaaatggctttataggtggtcctggatgggcatatgtagatggaatgtatccagtaatgtaaaatgtgcaaaaaattcttttgtagttagtgcatttgttatgaatttagtttactactttatgctattggtaggagtaattttatttgttttttatgggggaaggacatttgaaacttcaaatgaaataatgattacttttattttaaatgaacttccagtaggagccattggaattattattgcaggtgtgtttgcagcagcaatgtctagtatcgactctatattaaacagtatgacaactgtttttacgaaggatatttatgagttttatttcaaaaaagacaacaaagaatcatcattaaaagttacaatgattataactgtagttataggagttgttatgacaggttttattattatgggatttggaggaagcatcaaatcaattcttgaccttgttggtaactatatctcatactttgctggaccagctacaggtgcatttgtactagcaatgtttacatataaagctaatgataaaggagtatctattggttttattgtagggttagttttaggattttttatttctaataaatataatgtgagttggttgtggaatccagcaataggtgctacaataacattgatatttggatatatttttagtgtcattttaaagaaaaatcataaagtagatgatattaaaaaatacactgcatttggtatgagaaatcaccttatttctcaaggaatggataaagtagatggagtatctatagtgccattttctttaggtaaacaagaactaattgtattagctttttttattatccaatatattatattatttttgatacaattttaagaagaaatactagatatttaaggagaaatactaaatgaatcaaaagaaagttcattataataaatcggctacatcaaaagatgtcgcaagattggcaggagtatctcaatcatctgtttcaagagcatttggtagtgcaaatggaaagggcgtaaaacctgaagtaagagaaagaatttttcgtgtagcaaacgaaatagggtatgttcctaatttggtagcacggggaatgattagtggaaaaactaatgttataggtttgatagttggtgatagtctaggtccattttacaatagaattatcaatttatttgtagaaaaaattcaagagataggtaaacagtgtctcgtttttaaagttcctagacaacaaagtatagatagtataatttcaaaagtaattcagtttcaagtagaagctgtgattattacagcttcggccatgaataaggtgatggctgagacttgtgaagaaaacaatattcctgtgattctttttaatcgttttatacctggtataaaaataagtacagtctatgtagacccaattgaaggtgggggcatggttgctgaatatctgcttaagaaaggtcataagaatataggatatattcaatttacgagagaaacaagtgaagaaatggaaaagaaaattggattttattctaagttaagacaaagtgggattcataaccttaaagaagaatctgcaaactatgattatgattctggatatgaagcaggtaagagaatgttagcattatcaaatcctccaacagcaattttttgcacaagtgacttgatagctattggtgtaatggatgctgcaaggtttgagtacaagttgagggtgccagaggatttatcagtgataggatatgatgatattcaaatggcttcatggaagagttataatttaacgacgattagacaaccactagatttgttgattgaaaaaacaattaacatacttaagtccttattaaatgaagaaaatccagagtcagtcgttgaaatgttaaaacctgaattgattgaaagaggttctacactttaagtgatagatatttaattaagtggtagatatttaattaagtggtagatatttaattaagtggtagatatttaattaagtggtagatatttaattaagtggtagatatttaattaagtggtagatatttaattaagtggtagatatttaattaagtggtagatatttaattaagtggtagatatttaattaagtggtagatatttaattaagtggtagatatttaatcaagtgatagatacctaattaagttgtagatatctgataagaaatttttaagttttcaatcgttctaaattgtgagtataaaaatctactaaatttagttatgtaaaatataaattataagtgtagaaactaggctactagcttttataccacttcaaacattactggaagtagttaagtttacagcagtttagttttatgtagatataatattctgtaaatagacaaaattaaaatatgtaattaaaatatgtaagtgtctcaaaatgaaatttttaatttatgaggcacttttttgtataaaatcaaatatatttttataactttaacaataaaaagaggcttatctctattttgagacagcctcaaatttttaaaactatattagtttacagcttcttttcctatcaaatcttttaactcttcatgagtcatagtttctttttcaaataagaatttagaaacagaatgtaaatcttcaagattatcctttaacatctctaaagtctctttataacaaatttcaactatacgatttgcttccttttgaaccttatcacataagaaagtcttatcatttccatcaatagtcataaatcctaagttactcataccatattcacaaaccatttggttagctatttcagtgactttctttaagtcgtcctttgcaccagtagatttatgattaaatattaattcttctgaagcctttccagcaagtaatatttttatttttccaatcaactcatccttagtataaatatatctatcttcatcaggtaattgaagaacataacctaatgcttgtcctctaggaactatagatattttttgtataggacaaattcctactatatcacttacaagagcatgtccagcttcatgatatgctactatttttttctctttttcaaccaatgcagagtttttagattctagccctgcaataactctttcaagtgccttgtcaaaatgttctgatgtaatacactcactgtcatctctaactgcaaatatagctgcttcatttgctatatttgaaagatgagccccattgaaaccatgagtttttttagctaaaagttctagatttacagatttgtctataggtttgtcatctgtatgtacctttagaatttcaaatctagtgtgatagtttggtgcacctatatgaatgtgtctgtcaaatcttcctggtctaagtaaagcttcatctaataagtcaagtctattggtagcacctattattaatacattggaatctttattaaatccatccatttcaactaaaagttggtttagtgtttggtctttttcgttgttactttcaagatgtctctttgctcctacagcatctatttcgtctataaatattatacttggagcttcttttctagctttttcaaatagagttctaactctttttgctcccacacctacatatttttcaacgaactctgaaccagtaacattgaaaaatgatgagtttgtttcaccagctacagcagatgcaagtagggttttacctgttcctggaggaccataaaataatactcctttaggtatttttgcacccattttttgatatttttgtggtgacttcataaaatcgactatttcaaatagttcttcttttacttcgtctaatccagcaacgtctctaaatgtagtctttggttttgtagaaagtgaatcatctgtttgattatctctttccatttttgtctgtgcaaagacaggagctggattgttgattttcttaaaaaagttgtttagcattttcatattcacacctcaggtaattaattattgttaatcaattttatattttccatatttactattttttattatttatttttcatggaaaaaatatacatgttatctaaataaaaataaatttgtaagatgtatgaaaaaatgaatttatgtatatagagatttctacttatgtattgaataaagtattacaaattataaattatgtattgattatatattgagtaaagtattataaagcatgtattgattaagtatttattaagtattgaataaaatattacaaatttagttgaaatgaaaatgataaaaaatgttgtgctatattttacaaatcatataaatagagaaattgttgtagcacaaagtaataggtagtatattagaatataatataggatttgttgtgtagtatagtagcatattagaatataatataggatttgttatgtagtatagtagcatattagaatataatataggatttgttatgtatatagtagcatattagaatataatgtaggatttgttatgtagaatatatagagtcatgtagaatataaatatataaaaggattttgggtataaatttaaaaattaatagcaaaatgagtagtatagacatataattagtagtaggaagtaattaaatttttcctaaacaaaaaaaatagttgcaaataatttgattaagtgatatagtaaataaggtaagaataaaacaaagaagaagtccgcttctcaccttacgccggaggttagtaaggtaaatataagttaaagcttaattttaatttaagtttgtttaaatttggtaacttatattgcggatgattacgtcatccgctttttattttataaaaattttggaggtgtcctacaattagcaaagaattagcaatcaatgaacaaataaaagataaggaaataagagtcctttcaccaacaggtgaacaacttggagtaatgcctactaaagaagctcaagcaatggctaatagcaaaaacttagatttggttcaaatctcgccgaatgcgaatccaccagtatgtaagataatggattatggaaagtttagatatgagcaagcgagaaaagagaaagaagctaagaaaaaacaaaaaactatagttgtaaaagaagtaagacttagaccaggtattgaacaaaatgatttaaatacgaaagctaataatgctataaagttccttaaaaaaggggataaagtcaaagttgaacttagatttagaggaagagaattaggacataaagacataggtaaagaagttatgcttaagtttttagatataataaaagagtttggagaaccaacaaaagcccctgcatttgagggtaataatatggttgtaattatagatccaaaaaaatagatgattaactgagaggaggaatttgtcatgcctaaaatgaaaactcatagaggtgcagcaaagagattaaagaaaacaggaactggaaagttaaagagagctaaagcttttaaaaaacatatattaactaaaaaatctgcaaaaactaaaatgaacttaagaaaatcaactttagtaagtgatggagatgccaagagaatagcacaattattaccatactaagatacagattgtaaataataactatagaagagggatataaaaggaggtcataacgatggcaagagttaaaaaagctatgaacgctcgtaaaaagcataagaaaatattaaaacttgcaaaaggattcagaggatctagaagcaaattatatagaccagcaaatacattcgtaatgaaagcattaaaaaatgcttatataggaagaaagttaaagaagagagacttcagaaaactttggatacaaagaataaatgcagctgctagaatgaatggaatatcttattcaagattaatgaatggattaaaattatctggtattgaagttaacagaaaaatgttatctgaaatggctatacaagacccagaaggatttgcaaaattagcagaagttgctaaagcaaaattagcttagtattgaatcatgagatgtaaagtctttgagttatataaataattcaaggacttttttattttttgaaaaatacttattagtgtcatgtacaaccaattttataatgataaataaaataagcaatacaatagaattttatgagatttattataagaattgttacaattatttatcatagctataaaaagtcatagtaaaaatgatattgatgtatgtttatatatgtataaagctttcaatcaatcttgaattaatattatcaacatgataatattatcttattaataatataaataagggggagataatatgaatgagaaactaatggattgttttgtaaacccaattaaatgcaagttattgcttgaagttttttcaaataatcgaactacagctaaacaattaggagaaaaatttcaagatatatcaaaggcaacactttatcgttaccttaataaaatgttgaaagatgatattataaaagtggttgaagaaaataaaataaggggaactgttgaaaaagtatatgctatgaagttagatatagctgatgatgtgaacaaaattatagatgagaactctggagaagaatatgctcaactgtttactcaatatatgatgggatttttaagagaattttatgaatacgctgaaagaaaggaaaaggatatcctaaaagagggttcaggattttctgtctgtccagtatatgctagtattgatgaaatagttgaagtgagtaaaaaaattgctagtatactagaacctctaagaaataactcgcacgaagaaggcagaagaatgcattctataggagtgataatcactccacctaaagaggatgaagggaaataaatctgatttacatgaggtagagccaatttacacggaaaatcgttttatgatttacatatgtatccagagcaaagtatctctgcatggattgtacttcattgtaccatttcatccaatgacttggagtggaacaatgaagttttttaatttttcatattaatgcctaaagaaatgaactttagaccacatatgcaattaggctacattatacaattagaccagatatacagaataaaaattagtatttttatagcagataaattgactgttattcttcttaaaaatcatctattagttattgttagcatattgaaagaaattatagtaatccattgaataaatgaatattgcccataatcatataaactgctatagtttaaaataaagcaggacgttaaattttatagtaatcttaaaatttaagagggggattttatgaaaataaaatttgttattatgccattggtgatatttttaatagtattatttgtggggtgtcaaagtacaaaagatacagaagttaaagcaaaagatacagaaattaaaatattaggtacaggtgatttgcattcaattttgacagactctatggtttcatatgtaaatgaggaaagggaaaagaataaaaatctgcttatggtagatgcgggagatttctatggtacacaaagtagagaaatgtgggaatggtcttctggaaaaaagttaattaatattaaaagaaatggtagagcagagtatgatgacataattaaaagtagtaaagatgaagtacctatagttaaagatatggcaaagttgaaatatgatgctgtagttttgggagataatgaatttatttcaaatgataagcaaagtcttgataaactagtttctgattttaaaaataataatatgccattggtatcagcaaatatatatgaacaatctggagaaaattatgtacaaccatatgtaatgaaaaatattaagacagatgagggcaatgtaaaagttggaatactaggtcttactataaaagaagtaggggaaacccttggtcttgaggattttgaaaaggataaaaaagctagagagcttggagaacaagctgattacaaaggaaaattatatgcaaatgatttagtagaagatgcaaagaaatggataaaagttatggaaaaagaaagtccagacataatagttgcagttgtacactcaggggaagaacctaaaacagatagaaatccaggaaatagaataaaagagttagcaactacagtggatggaatagatgcaattgtagctggtcatactcatgaaaaaatagatgaacacaaatataaaaataaatctggagatgaagtaattgttacacaaccaggttggcatggagatagagtatcagagattaatttcaaattaaataaagagaatggaaagtgggacataaaggaaaagtctagtaaattaaaaataattgataaagaagtaagtatagttgctactgcagatttacattcacatttctctgataaattaacagttgaccttgttaatgaacgtagtaacccaattgaacctgttgtagtagatgcaggcgacttcttagaccctcaaacagatgaaatgactcaatggtataaagagtggaaaagtataagagataataatagtgataaaacgattagtagatgcccaatggtcatggatatgaatcagggaatgtatgatgcagtagtacttggaaatcatgaatttgtatctgaaaaagatgaattttggtcagatgaacgccttttagatgctgttatagaggattttgaacaggtggcaatttctgtgttatcagcaaatatatataggcaatctggtaaaaattatgttaaaccatatattataaaagatgtggagacgagtgaaggtaatgtaaaagtaggaatattgggacttactataaaagaagtaggtaaaggtcttaaaaatgtaaacttacaagagcaatttcaatataaggataaattgtatgcaaatgatttagtggaagatgcaaagaaatgggtaaaagttatgaaaaagaaaaaaccagatataatagttgcagttgtacattcaggagaagaaccaaaaaatccaaaacacccaggaaatagaataaaagagctagcaactacagtagatggtattgatgcaattgttgctagtcatactcatgaaaaaatagatgagcatgaatataaaaataagtctggagaaaaagttatagtgacacaaccaggtgagcatggtaaatattattctaaaattacctttaaagtaaataaagaaaagggttcgtggattattaatgataaattcagtaaaacaattgaggttgaataactttataaaatttatagataaagtaaattatctgatattgacatgatatataagataaagtttctaatattagtataatgcataatgtgaaatattttaataataagagaataaacaagacaaataaaaatattttaacatgtaagatatagtatgaactattatactaatgcttactttataatttgaacatgttagaataagtcttatttgaaaattttagtgtattagagtaagtattattttaccagtaaaaaatattgagaactatatgtagatttgcttaaaaaggaatttacatatagttcttttcgtataataaatagtacaatcttatatggtaaagataaagtgtgatattaaattttattatcatccaaaatctaaggaggagtctcttatgaaaataaaatttattatagtagcatcaataatatttttaatagtattacttgtggggtgtcaaagtactaaagacacagaaatcaatgtactcgccacaagtgatttacattcaattattccagataatttaatttcctatgtagaagaggagagaaaatatgatgagaatctacttatggtagatgcaggagatttttttgacatgcaaagtggtgagatgaataagtggtttactggtcaaaaattagtaagatttaaagatgggataccagagtacaaaaaaatagctgaaccacgtgaaggagaagttccattggctaaaaaaatggcaaagctgaagtatgatgcagttacatttgggaatcatgaatttgtatctaatgacaagcagagccttgataaattggtttctgattttaaaaataacaatataccattagtatcagcaaacgtatatgaacaatctggagaaaactacgtaaagccatatgtaatgaaaaatataaatactgacaagggaactgtaaaggttggtatacttggtctgactataaaagaagtaggggaacgttcaaggtttaaaagttttaaacaagataaaaaggctagagaacttggggaacaacctcaatacaaagggaaattatatgcaaatgatttagtagaagatgcaaataagtgggtaaaggttatggaaaaaaaagaaaagccagatataatagttgccattgtacattcaggtgaagagccaaaaaatcctaaaaatccaggaaatagaataaaagaactagcaacaactgtagagggaatagatgctattgtagcaggtcatacacatgaaaaaatagaacagcatacatataaaaataattctggtgaagaagtaatagtaacacagcctggagctcatggtaatagtatatcaaagattaattttaagttggataagaagaatgataagtggtttataaaagacaaatatagtgaattaaaggtttttggaaaggaagtaaatataattacaacttctggtctgaatccaaaattttcagatgaaatggcagttaatttgtttaatgaaagagatagagatgttcaacctatctttatagatactggagattttttaaatactaatacaaaagaaatgactaagtgggctaaagagtggcaatacaatgaaaataaaggcatctataaaaaaataaatgaatggccaattgtatatcttggttatgatgctgtagtacttggtagccatgaatttacagaggataaagagacttttgagggaaaaaaatctacattggattatattatagaaaactttgaagaaatgaagataccagtattatcagctaatatatatgatgaatctggagaaaattatgtaaaaccttatataattcataatgtagaaactagggaaggaaatataaaggttggagtattaggtcttactactactgataaggatgaagaagacttaagtagctcaagcttaagcaaagactcaaagacttcgaaaattcctgaagaaacaggaaagttatatactaataatctagtaaaagatgcaagcgaatgggtaaaagttatgcaaaaggaaagtcctgatgtgattgttgcagttgtacattcagataataatagtactctaaaaaatccaagtagtgaagtcaaaaaacttgcaatgtcagtagatggaatagatgctattgttgtaggtcatacgaaaaataaggtagaagaacatatttacaaaaataagtctggagatgaggttatagtaacacaatctggagaagattgttattcaaaaataagtcttgaactaagaaaagaaaatggcaagtggaatatcataaacaaatatagtaaagcaataaaaatgaagtgaatttattgatatataaaccattattaacactgatttttataatataataaatactgattctacaatataattaacactacttttttaaatataatcaatactgattctacaatattattaatactactttttataatataatcaatactactttttacaatataatcaatactgattctataatataattaacactactttttaaatataatcaatactgattctataatattaacactattttttatgctatataacaattattgaaaatgatataaatataatatctcaaatgatatgaatataacatctgaatagagggtgttttatttgtaaaaaataagtttacagtttgagcgtataaacttatggtaaaggagaataattatgaattataagaagattgcaattataacgggtgctaatagtggttttggtaaagagtttctaaagttattaataaatgaagaagaaataacagaaatatgggcagttgcaagaaacaaggcgagattaaatcaattagtagatgaatttggaagtaaggtaaaagttttttcaaaagatttatcaaaaatagaagaagtaaaagaaattggtacatttttaagtaaagaaaatgtatgtataaaataccttataaacaatgctggttttgcaaaattctgttcatacaatgatttaagtatagatgaatctattaatatgattgatttaaatattagtgctgttgtagtattgggacttatatgtattccatatatgcaaaagggaagccatattatgaatatttcttcacaagcatcattccagccattgccatatcaaaatatttatagttcaactaaagcgtttataagaaattatacaagagcattaaatgttgaacttaagagtaaagggataaatgcaattgctgtatgtccaggttggatgagtacaaatctatttaagagaggtatagttgtagctgaaaaagggacaaaaaatttcccaggcatagtgtctccagacgttgttgccaaaaaagcattgaaggatgcaaagaaaaataaggatatttctgtgtatggtataaatacaaaatccagtcatttattagcaaaactattgccacaaaaaatgatgatgaaggtttggttaatgcaacaacatattaaggaataagagtttcggtaattaagtatcagttggagattcaatctattatatattataagaagttttgttgagcaaataataattgtgacaaaacggcttatctagtgccgataagccgtctataatgtataaaaaatatatttttgattttactttatttagatattgaagtattaaaatatgtaggacttgaaattttataaagataaatactatgatattttgtaaaaactgagatatgttgatattacatagtttaactatactgttaaattgaagttttcttattttgcattatgcttattacttaatgatttagactataatttccataccatcatatgcaaaataaatgttatcaagtttcttttctaattcactgtaataaccatatgattttccccacatttcgtcaatatgtgtaatgataatctttttaattctataatagtttttaatttcaacaatctcatctaaagtaaatatttcatctttaaatggtgtgtcttcaagttttgtaccatcatttaatataccatcatcagaaactagacttattattaaaacatcagcatcaaagtacatatcactatgagtaaatggcttgggattacagcaggcatatatgacttttttttcattctctttgataacatagaaggttatattcctgtctgggttattgttaatcaaatcaatatcaaaattatttatctttacatgcgaagtttcattaatagaaatgcaatttataacatcaccataatatttaagacaatcgagattcgttcggtttatatcttcaattacttcaggaagagcataaaagccaattggattattttctcctgtgataaagtcacatcctattttttcgacaattctaatacccttaacatggtctgggtcatggtgagaaattgaaatatgttttacttccgatattttttgtctgttacaagctactgtaatatcttcaggtgtgtctatcagcatttttatatcatcaatatataaacttggtcctaatcgttcatatcttccgcctttttgcctggcttcttcacatattttgcatttacaaaatgaacttggaataattgacataccgccactaccaacaatttttaatttcaaagttattacaccaccttctaaaaatattagattatataaataatctacaatcacaactgattaacaaaattatgagttaataaattatatcacatgtaaatatgaaagaatagtatgaaatttttataagattatattaaatatttctcaatgaaattgactttgtatatgagccgaatgactttattcaatatagataagacatttttcttgtaataagatatgattattctataaggttcatgtaattttgatataaaatattgattaataacatatatgttattggtgaacatatttctatagaatggaatatataattttttatatttatcattgtattattatacaaagaaagttaaaaagagtagagtacaaaggaattatttgtactttactctttgttttgttaaaaactaatttatattagtgattcaaatatttaactagagtataagggttgtatataatcttataagtaatttatctgacaaattaagataatatcctaatcaaattctagtcattcgaacataacatcacaagtgatttatctgacaaattaagataatatcctaattaaattgtagatatttatacataacactaaaagtaatttgtttaacaaattaagataatatcctaattaaattgtaggtatttatacataatactaaaagtaatttgtttaacaaattaaaatattatccaattaatataaaaattacttctttttaactgggaagcatacctctgttacccaattatcaggattactatcgttgccaggacttacatgataaatattaaacataggaccatccacatcatagttattatctgatatccaattaccaatagcctcacaagcgtctgcaacttgattgaaatttccattaacaattgcagttgcagcagtcacacttggaacagtcttaaatttaacatgttcagtatctttatactttccagatacagcaacttgtacttcaacatctacagaatcttctttatatccagtatcataaaagactgctttagaatactttgggggttcaatttgaacattctggtcttttgtctctaaaaatgcttgatgccataacattccttcgtcttgataagttggtataacccttctaagtgtcatcatatattttggtgcaaaattctttatagttacatcataatttttcataatatcatttcctccaattcttttaatagtggtttctatttttaatagttttttctgtgtatcttctaattgttcttttacttgagaatggtggatatttagatattttataagactttctttatcgttatattctgtcaaaatttcttttatagaatacaagccaaagcccatatcttttagtgcatggattctatttgtagtagaaagttggtctgcactatagtatctatatccattagtgttattcgtatgagaaggagttaaaagtcctatttcatcataatgacgtaacatacgaatactaattttacttagctttgaaaaatcgcctatcttaaacatgtttttgtctcctttataaaggtacttttagcttaatattaatataaaccatatcataatgttagagtcaactaaaattataattaaattatattgacatatgatgaaaaaaatattatactgaacatgttcagaacctaaaatgttaattattttggaggtctattatgaaaagtaatgataaagatgctagagaacgtataattgaagttacattgaatcttttaaatgaagtagatgatattgaggagattacagttagaaaaattgctgagcgtgcaaatgttggagttggtttaataaattatcattttaaaacaaaggataatttgttgagtactgccataggagatgtgatgtcaaatataatagcagagctatatgacgatagtgtatatactctaagacctattgaagatttgaaaaatttattaaaaaaattgtgtgatactggattacattatgaaaaagtgcttccttttgtgttgaatcaatgtataaccaatggagatatgcaagcagaacttgatattgtccctatgcttcgtaaaatttttggaaataaaaaagatgaaatgagtctaagaatcattgccctgcaaattattttaccaatacagatttctgctttatctacagaatcatttcagttatacagtggtataaatataaagaataaatatgagcgagataaattcattgatattttaatagaaaatattattggagaggatgttgatgtaagatgaaaattataactattggttcaagtcttatcactgttttactttttctttcaactatggtttgtgggttctggattaagaataataaggtaacagatgcaagttctattaagttccatatgaatagtgctatttttacagggatatttttattgatttccacaatccttttaattatatatataaaaaaataataatattattaataaataaagtatcagaaattataaagacaagagtcttaaaaatttctgatactttaccacataattttattaaacattaattgtgtgtgaaaaaatatcacttatttcaatctaatactaaatcttaagagtgagtataaagtattagaaattaagaagcattttttagttcaagtggattatctataccaaaataatcatataaagtagagcttatttcctctaaatttccatcttggaaaggtaattgtaaatttaccttttctaccacatctttaaatccagcatcagtattttgatttaaaaaatccatatatacatcaacagcttttctgtaatcttcttgtgataattgccatatctgaagtgatacatcagatgcaagaccataactcaagtaataaaaaggaacttggaagttatgagatacaagtatccaaaaaggagcatttttttctctaagtatattattggaaactccatattcttcctctaaatcaaaaaacaatttattgatatcatttagactcatatatggattcttgtatataatttcttgaaattcatcataaagacaagcatcaataatagtatttaaaacaatcgataagtgttctttttttatagcttcagattgtttaccaaaaaaatcatcaaaatatttataaaatagaatttctaaagatgttgaatgaacttcacatacatctatacttggttgcatcttattatttaagttaatactgttgtagtaattataaaaatgaccaaactcatgagcaaaactagtaacacctaaaaaagaattgtcccatgtattaaacaagaaaggtgctttatatttatttatataagtagtatatcctccaggcgatttgttttttccagaagaataatcgtacaagtcatattttttcatatagtcgaagctctcttttagttttggagatatatcttcaagtactttatcaaacttcctaaatgagcgatttttatatactttaatataaatagaagaatcagatggtttagatgaaatctctctatataatggaactatgtaatcttttacatcttgtctaaattttttagcttcttcttgagaatagtctttgtttaggttcatataggcataatctatataattcttaaatccttgcttacttgctatttcagttcttgtctgtataagttctaagaatatgttaccaaatataggattgtatttttttaagtaatctgaataaattttcacatattcttcagggctaagatttggtcttgacaaggcttcttcaaagtctacctctataccatctattgatactgtagatttagctaataagtcttcatattttacaactaggtcttgctcttttttaagtaaatcttcaacttctttagaattaagttttccaatgttctttagataattaaatgtatcctttccaagttctttttctaattctttagagaatttagaagttacaaatctatcttgaaagtctttgtatgacatgtcaacatctactgatttactcataagatacttatattccttagagtaaaattcgtctgatgaatctatgttatttctaatttttgctatagtaagtgtactgtaaaaatcctgataaattttatcaacttcattaaataaatttaattgttccttagctgttttagctgttaaaagtttgtcgttacacttgttaatgttttcgcaaattgactgtatattaggacgcttatattccattttttcaaaaggaatagttcctctaacagaatctttttttgtatcattagtataatttcttatgtatgatgcaaatataataaaaactgcaattaaaattagaaaaacaaatattttcttcttggatttaaccataaaaatcctccaatcatggatatagttattaattattttactatattaaatataaaaaatgcatgttaagaaaatttaacataaagatatagataagattataaataatataaaaaatttaacttcaaaaaagtatatgaaatttatactggtaaaatgataaataaattttaagtacaaaatagtaaaagctatgatagttttagacccattatatgtaaaaaatatagatgtttttggtgcaatttaaattaaaagatatatataaaaatttaaaatattccaaacagaaattataaaaattactatcattgtctttatgcaatatttatactataatagaataataatttagaggaaagctctaaaaataaacaaattaagggtcttaacagtagtgattttatgttaaggaggtataaagaaagttgaaaacaatagttagaagacttattctctacgcagatggaatgcgtcctactcaaataatggtatctgggtttgctgcgattattgtaatcggagcattgttgttaacactcccgatagcgtcgcagagtggagagagtataggcttattaaatgctctatttacggctacttcagcggtttgtgttactggtctagttatggtagatacagcaacttattggagtttatttggacagatagttataataacattgatacaaattggtggtcttggatttatgaccgtagccacaatgttttcacttatggcacgaaaaaaaatacaactaagagaaagattattaatacaagagtcattaaatcaagctgatttatcgggacttgtaagacttacaagatttgtattaataataaccataacaatagagggaataggtgcactggttttatcaactgtctttattccacaatttggtttgtctaaagggatatggtatagtgtatttcacgcaatatcagcgttttgtaatgccggatttgacttgatgggcagtgtaagtggcccatttacatcgttaaattcttatgtaaacaactttacagtatcaatgactgtttgcgcacttatagtgcttggagggctaggattccctgttgtacttgatattgtaagaaaaagaagattttcaaaattaaatgtgcattctaaggttgtattgttttcaactgctacacttatttttgtgggtgcattatttatttttcttatagaatttaatcaaaaagctactatggcggacttgcctttaaagggaaaagtactatcagcaatatttcaatcagtaacagcaagaactgctggttttaatacacttgatttagctactttacgagaaagtagtgtatttgtaatgataattttgatgtttattggagcatcacctgcatcaactggtgggggtataaaaacaacaacactagctgttttaatcattacagttagaagttttctatcaggaaaatcagatatagaagcttttgaaagaagattagctccatcaactataaaaaaatctcttggtatatttgtaatcagtatatcagcagttatttttggaacattgattatttcaataactcagcctaattttacattagttcaatcagcttttgaggttacatcagcacttgctacagttggttcaagtttagctggaactccaaatttaaatgctttaggtaagattataataataatctttatgtttatgggtagagttggttctcttactttatttatggctatactttctggtggtagaagaaagagtcaaccaatcagatatgcagaaggtaaaattatggttggttaagttaccaaggagtaatataaatttataatggatttagagtagcactgtaaatctgttgataaaataaatgagcctagatgtaattatatgaagaaataaaatcaactaataaacaaaattaattaatgaaataaaaaaacagggaaataaaatacaaataaaaaggtaaatcaaaattaaattaatctgtgtatataaaattatatattgtgtataagttttgtatgtgtaaagtatataagttttgtatgtgtaaacaattaatttaagagatattatataaattgtgtattagggaggaagtttcgagatgaagcaatatatagtcattgggtgtgggagatttggaagttcagttgcgtctactatgcatcttttaggacatcaagtaatggcaatagacaaaaatgaagattcagttcaaagtatatctgacaaggtaacccattcacttatagtggatgttactgatgagcaagcgttaaggtcattaggtttaggtaactttgatgtagcagtagttgcaataggttctgatataagggcatctataatggcgactcttatagccaaagaaatgggtgtagagttgataatatgtaaggcaaaggatgaattacaagctaaagtgctttataaaattggcgcagatagagttgtatttccagaaagagatatgggagtaagagttgcacacaatttagtttcggataatatattagaccatattgaacttgacccagagtattcaattgttgaaatcgtaactccaaatagttgggttggcaagacacttatagagcttgaattaagagctagatatgagataactgtacttgctataaaaacaggtaaaaatataaatgttacaccttctccagatgaggaacttacagccggaagtatcctagttataatcggtcaaaatactagtataacagcgataacatctggaaataaggggataattagaagaagataatttactatttaatatatatttaattgcaatgaaagtaaagagtatcatataattatgaatagttatatgatactatttttatttaatcgaaggtagtatttatttgtaagattagataaagagaagttaaattaaaagtaaggaggctgtgctaatataaaaatttataagttattagcatttagataaaatgattacaaatataaacagtaaggataatgaaaagttaaagtatacaagagcactattaaaatcaaagaataggaataaagagtcaaagttcataatagaaggatacagaatagtaatgcttgcacttgaatgtatggcaaaccttgattatgtatttatcaatgaagaatttgaaaataagaaagaacatgtaaaactattagaagatttggataaaaaaaacacaaagatatacaagactactaataaaaactttaaagaattagtggatacagaaaatactcaaggaataataggtgtagtttcatttaagaaaaaaaaattaagtgaaagtataaataaaaaagataaatttgtattgattttagatagaatacaagacccaggaaatatggggactataataaggactgctgattctgctggagtagatgccataatagcactaaagggatgtgtcgatatatacaacccaaaagtaattaggtctactatgggttctatttttgatatgaatataattgatgcttcacaagatgaaactgtggacatgcttaaatcattggattttaatatagtttcaagttacttaaatacagaaaatttttatgacaaaatagattatggttcaaaagtagcattggtgataggaaacgaagcaaatggaataaatgaagaacttgtatcaaagtctgatattttggttaagatacctatatatggtaaagccgagtcgttaaatgctgcgataagctctgctatactgatgtatgaaataaaaaaatacttaatttaatgtattgtaataaatataatgtcatgttataatcttgaattaaatagtagagtatcaaaaatagtcaatatatattaaaaaaataattaaattaattatatattagatgtatatcatataaaaaatgattgagttgattatgtattagatatatattatataaaaaataattgagttaattatgcattagatgtatattatataaaaaataattgagttaattatgcattagatatatattatataaaaaataattaaattaattatgtattggatatatattaaaaatagtcacataatttgaatggaaatgatataatactaaaataaacaatataatattgtaaatgcaatgaaagaggaaagtattttgattaaacttagtaaagagataaacacctaggctgggagtgttttctaagaggtcatgagaagttccctctggagtaacagagctgaaattttacagtaggctttgacgtcaaaaacgcgttaagtttgttagaggtggtttgatgatttttaaattgttaaactactagggtggtaccgcgaaactatagcctttcgtccctagacagggattgaggggctttttttatacaaaaaaacgaaagggtgatatgtgtgcaagaaaaattacttgctttacgtgaagcagctttggctgaaataaaagaagcacaaagcatagaaagtgtagaaagtttaagagttaagtacttaggaaaaaaaggtgagataactgccatacttaaagaaatgggtaaattatctgctgaagaaagaccagtagttggtaaggttgccaatgaggtaagagaaaacattgaacttagcataaattctaaaaaagaagaaataaatgctattgaaaaagaaagaaaattaaaagaggaagtgatagatgttactcaaccaggaaaagttttaaaggttgggaagaagcatccaataactcaaattatagatgaagtaacagatatatttatcggaatgggattctctatagcagaagggccagaagttgagactgttgaaaacaactttgacgcattaaacgctcctaaagaccatccatcaagagatatgagcgatacattctatatcaatgatggggtattacttagaactcaaacatctccagttcaagtaagaactatgagaagtcaagagttaccaataaaagtaattgcaccaggtagatgttttaggtcagactcgccagatgctacacactcaccaatgttccatcagatagaagggcttgttgttggaaaagatgttactatggcagaatttaaaggaactatggatatcttcgttgaaaaattgtttggttctgatatcaaaactaagtttagacctcacaacttcccatttacagaaccaagtgcagaggttgatgttacttgtttcaaatgtggtggtaaaggttgcccaatgtgtaaatatgaaggttggatagaaatattaggttcaggtatggttcatccaaatgtgcttagaaattgtggaatagacccagaagtttacagtggatttgcatttggagttggggttgaaagacttgcaatgcttaaatacgaaatagatgatattagattattattcgaaaatgatatgagattcttaaatcaattttaattaggagggtatgtagatgttagtatctttaaaatggcttagagactatgttgatatagacatggatgtaaaagagttcgctgataaaatgacaatgacaggaactaaagttgaaacaatagattattatggtgaagaaatagaaaatatattggttggaaagattttagaaataaaacaacatccaaatgctgataagttggttgtaactaaagtagatattggagataaagttgttcaaatagttacaggagctacaaatatatcagaaggagattatattccagtagctgtaaatggttctaagttacctggaggagttgaaatcaaacagactgatttcagaggtgaattatcagatggtatgatgtgttcagcagctgaactaggtatagatgaacattacattgaggagtataaaagaggtggtatatatattttagaccacgaagattcttatgaattaggaaaagatataaaagatgttttaggattaaaagatgctttaatagattttgaattaacttcaaacagacctgattgtaaatgcatgatgggtatagctagagaagcagctgcaactataggaacaaaagtaaaatatcctgaaatcgaagtaaaagaaagtgacgaagagatagatttcaaagttgagatagataatccagatttatgtagaagatatgttgctagaatggttacagatgtaaaaatagaaccttctccatattggatgcaaagaagacttacagaagcaggagtaagacctataagtaacatagtcgatataacaaacttcgtaatgttagagcttggtcaaccacttcatgcttttgatataaatcaagtagagactggaagaatagtagtaagaaatgctaaagatggagagaaacttgtaacattagatgatgttgagagaacattagataaagatatgctagttataacaaatggagaaaaatcacttggtttagctggtgtaatgggtggtgctaactcagaaataacttctaatacgaagactgtactttttgaaagtgccaatttcaaaccagaaaacataagaatgacagctaaaaaagttggtattaggtcagaagcatcttcaagaaatgaaaaagacttagaccctaatcttgcagagatagcagcaaatagagctgcacaacttgttgaaatgttaggagcaggaaaagttttaaaaggtgttgtagatgtatatccaaataaaccagaacctaaaaaattggtagtaaatcctcaaagaattaaccacctattaggtgtagatgtaccaatggagcagtttgtaggaattttagaatcattagagtttaaatgtaatttggtagctaatgataaattagaaatagatgtaccaagctttagaacagatatggaacaagaagctgatgtatgggaagaaatagctagaatttatggatttgagaatataccttctgtacaattagaaggaaatacgacagcaggaattaaaacttcaaaacaaaaattcatggatgctttaaaagataattcaactgctgtaggattaaatgaaatattaacatattcatttgtaagccctaagggagtcgataagataagagtaccagaaggtaatgctaagagaaactttgttaaattacttaacccattaggagaagaaacttctgtaatgagaactactttaataccaaatatgttagatgttttatcaactaatgtatctcataaaatagaagaagtatctgcatttgagtgtggacatatattcatcccacaagattcagaattacctaaagaagaaaatagaatgtgtgtaggtatgtatggtaaagatgttgacttctttgcactaaaaggaactatagaaactatacttgtaaatgtcggatttaaaggttatgaaattgaacctcaagataataatactaccttccaccctggtagatgtgctaaaatagtgtataataataaatatgtaggtacattaggtgaattgcatccagatgttatagaaaactacaatctaggtcaaagagtttatgtcgctgaaatagatattgactttgtatttgataattctgatagaacaaagaattatgtgccattaccaaaatatccatctacatcaagagatatagctcttattgttaaagatgatgtatttgtaaaacaaatagaagatataataaaggaaaatggtcaaggattagtagaaagctacaagttatttgatgtttacaaaggttctcaaatagaagctggatacaagtcaattgcgtattcaataacttatagaagtaaagataaaactctaacagatgaagatgtagctaaggtgcatgataagatattaagtgaattaagcgaaaaattaaatgctaacttaagatcaaattaacaactaatgtcgggggaggttaggatgaacaaagtaatggttaaaatccatggcgctgaatatccaatggttggagacaaatcagagaagtttatgattagtattgctgattttgtagacaaagaaatggataaaataacacgtcaaaacccgaaattgagcttatcagttgctgcgatactaactgcattaaatatatcagaccttttatttgaatgttcagatgagaatgagaagttgattaaagctaatgaagaattgagtaagaaggttggagcatctaatgaagagcttcaattagaaatcaagtctttaaagcttacgatagcagaaaaagaagcagaaaatcgtgaagctgagactaagatgaaagagttaattgagattatagaaaataaaaagcaagaaatattcgaacttagtaatacgacagaaggttctagagcagagttagatgtttataaaaacaagattgaggagttaagtactcaacttgaagaagcaaatgaaagagctactatagctgaaaacttagcttctgagtttcaaaacaaagcttatgatttacagttaaaatgtacagggttaaataatgatgcaaaaaatgtggaataaactaaaagatttgctgtctcttgttttttgagacagcttcttttaatgtataaatataaatgctatataaatatagctaatgtttaaatgtaaataaatataaatgctatataaatatagataatgtttaaatgtaaataaatataaatgctatatagatatagataatgtttaaatataaataaatatgaatgatatataaatacaaataatgtataaatataaatgatgtataaatatagataatatttaaatataaataatttttttatatcaatgaaaaatagaatctaaaatgattttgattttgtatctatcattagaaagcgagaggtttatatatgacaagcaagagtcagatgtctgaatcattctttttatgttctttgttggcaataacaggaggatttttggatatttatacttatgtggtaagaggtaaagtctttgctaatgcacaaactggaaatatagttttatttgggcttaatatagcagaaggtaatgtaaaggaatcattttattatttgattcctattttggcatttatgttaggtgtatttatagccgagaagataagaaagtattttacaaataataagacaaagattcattggcgtcaggttatcattataattgaaatgattacaatacttattgtttcatttattcctagaggaagatttaatatgtttgtaaatgttgctatttcttttatttgttcaatgcaagtagagagttttagaaaagtaaatgggaatagttttgcaacgacaatgtgtactggaaatttaagaagtgctacagaaactttatttcattatatacatactaagaatatttttatgataaaaaagagtttacagtattatgctattattatattctttatatctggagctattttaggaactttttttacaaaaattttcgtggaaaaatcaatactaatatgtttttttattttggcagtggtctttggaattatgtttatcaataaagatgattcatttaatgaaaattaactttctgtaaatttacaaaaaaatgaagctgttatttgatatactttatatatagcaaatattgtatagattaattaaagaatttaaaatatagtaagcaatatataagttaatagaagtattttaagtatagtaagcagtgtataaattaattaaaatgtcttaagtatagtaggcaatatatagattaatagaagtatttcaagtatagtaaacagtgtacaaattaattaaaatgttttaaatttagtaagcagtatataaattaattgaagaatttaaaatacagtaatcaatatataagttaatagaaatatactaaatatagtaaataatgtatatgttaactcaaatggaccaaatataaataactaatatataaattaattgaagaatttaaaatatagtaagaaatatataaatttaatacaaatatttaagttatagatataattatattaacctaacaagtataaatagaggagaaaaatatgaaaaaaatagaattacttgcaccagtaggctcttttgattcattaaaagcagcagttcaaaacggagcaaatgctgtgtatttaggtggtaaagactttagtgctagagcatctgcaaataactttgatagaaatgagctgattgaggctgttaaatactctcatataaggggagtgcaagtctttgttactgtaaatacattgataaaacagtatgaaatagaagattttgtagagtatgtaaaatttttatacgatatagatattgatgctttaatagtacaggatataggaatggcaagacttataaaaaaactattacctgactttgaactacatgcaagcactcaaatggtagcacattccttagaagatgtaaaataccttcagagtgtagggtttgatagagttgttttagcaagagaattaaatgttgatgagataaaatggatttgtgaaaatacaactgtagatatagaagtttttgtacatggagctttatgtgtatgttactcgggtcaatgccttatgagtagtatgataggcaataggtctggaaatagaggtaggtgtgcacagccatgtagacaaaagtatgagttgatagatataaatacaggagaagtagtaaaaagtaatggagattatttgttgagtcctagagatttaagtactatagaagatttggataaaataattgaaacaggtgtattatctttaaaaattgaagggagaatgaaaaaaccagagtatgtagctactgtggtttcaggatatagagaagcgattaatgaatttgtagataagaaaaaaataagtatttctgaggaaataataaataatttgtataccatatttaatagaaagtttacaaaaggatatatattaggtgaagttggtaaggatataatgaactctaatagacctaataatcaagggctatatattggaaaagttttagattataatagaaagaacaaaagacttagagtaatgctagaaaatacgcttaagaaaggtgatggaattaacttaggtggaggtactattggaagaataataaaggatggagagataactacaatagcacataaaggggatttgatagaattagattttgttggagaagcaaagagaaatcagcttatatataagacttctgacagcgaattaatgaatagagtacaagctacatttcagcaagataaagagttcataaaaactaatatacgtgcaaaagtgagtattaaactaggtaaaaagccagagctttttataagtgatttttgtggaaataaatcggtggtagaaggagacaaaatagttgaaaaagctataaaggtggctttaagtaaagaaaaaatagaaacacaaattcaaaagcttggaaatacaccatataagttaaaagagatagaaattgacctggatgaaggtgtaagtatgcctataagtgtgttaaatcaaatgagaagggattgtattgagcttttagatgaagaaagaataaagataaaagatagaaaatttaagaagaatagattaaaataccaaccaaatagagtaaataaacagaaaaaacttgatacagttcctaagattagagttaaagttaagaacttggagcaattagaagcagtattaaattataatgtagatttaatctattatgaagatataaatacattatcaaaagctttacaaatggcctcaagtatttctatagattcaagtatttctatagattcaagtatttctatagattcaagtatttctatggatttagatacttcttcgtctttaggtattcctaaagaactaatgggttcaaatacaaataacatagatactttgtcaaatacaagtaaaatagatactttgaataagaaccactataatacagcagtcactgacaaaaaattaatctattcagcaccaaggattgttagaaataaagagtacaagcaatttgagatattggataatataaaaggaattaataaggttcaaattggtaactggggctctatggaatactttaagaaaaaagacttaaatatagattgctacttaaatgcattcaatagtgaaagtataaaccacttcaaagaagagggagcaagtacagtttgtttgtcacaagaactaaacttaaatgaaattaaacaaactttaaaatatacagatgtagaaattgaagcagtaatatatggatatgctcctatgatggttacagaatactgtcctatgggagtagttgttagagattgtaaaaaggacaagagagttgctaaatgtaaggaaagtagttatgctttaagagactttacggatgcaagttataggataacacaagatatattctgtagaagtacaatttacaattcgaaggttacttgtatgttggacaatctatatgagttagaggaaattggaatagatgtatttaggatagattttacagttgaagatagtgagatggttaaaaaggttattgaagctcacattgaggtattgagtaataattataaacttggaaaaaaggctacagatttgtataagaaattagatgaaattggaacagttgcaggacactactataaaggtgtagaatagatataacatgaaaaatatacatgaatatatataaagacttgaatttatgtgtattaatatataaaaatatcatatatgtgaaaaaacagggggattggtgaaaatgagagaagaagctttagaaattttatttaagtatttagaaactgatagaatgagaaaacattgttatgctgttgaagctgttatgagagaattagccaaaagactagagccagaaaaagaagaagagtgggcagtggcaggtcttttacatgatttggattcagatatagttggaagaaagccaggagaaatatgtgaaggacatgctacaacaacagtagaactgcttaaaaaagaaaacttcggtgacgaagaaatgtatagagcaatacttggtcatcatgatggaatgggagttacaagaactagcttaatggaaaaagcaatatatgcagcagaccctataactgggtttataactgctatagctttagtttatccagataaaaaacttactagtgtaaagactaagtctgttattaaaagaatgaaagaaacgagatttgcttcaaatgtaaatagagatgcaatgagaagtatagaagatatagggattccatttgatgaatttgcagaactttctcttaatgcaatgaagaatataagtgatgtgcttgaaagtgctgaaaataattaattgagaatataaagagaaagtaaggcgagatacatgaaacttacaactatttgttatatagaaaaagatgacaagactttgatgttgtacagaaataaaaagaaagatgatatacatgaaggtaagtatgtaggagttggaggaaagtttgagcaaggagagactccagaagaatgtgtaattagggaagtaaaggaagagactggtcttactcttaaatcattgtcatataaagggttgataacttttccaaaatttaaagatgaagaagattggtatatgtttttgtatttctcagatgagtttgaaggtgaattgtctgaaaaagatttaaatgattgtaaagaaggaaatttaatttgggttggtaatgataaaatattcgatttaaatatgtgggaaggtgacaggttgttcttaaattgggctaagactggaaatatctttagtgcaaagattgtatatgataatgggaaactaaaagattataatgtaagtttcttagattaattaagatatagtttttagattaattaaaatgtagtttaatgatatattttaagaatataatttaaagatattacttaaaaatgtaatttaaagttacatcaaattaaaatgtaacttacaggttatagcaaattaaatttattgatataatattaaaataaacaatagtagttgggaaaaggggctatctcagtgcataaagatagccttttttagtctgtctacttaacaaggacatatccaaaatagaggtaagccttttttattgttgaaatgataaatatccacttgatttcatacaataaagaatgtctcattaactaaaaagttcacttttagacatttacttcttttatcttttattttgaataaattctaatttaagttctaattttatgtatatttttctccattaaagtgtagttaaggctagtatattgttaaaaaaataaaaattgacttagacaactatttgttttatactaaagtaaattttttaaaaggaggaataatttggaatgatagacataaatttagaaaaatgtgtaggctgtgggatgtgtgaatcagactgtcttgtaaatgcaataaaagttaaggatgataaagcaaaggttaaaaatattctctgtattaactgtggtcactgtatggcaatttgcccaacagatgcaatagaaatgcaaggatttgataaaaatgaagtaatagaatacaatcgtgaaagttttgaattagaacccgaaaagttattgaattttattaaatttagaagaagtataagacaatataaagatatagaggtagaagaagaaaaaataaaaaacatagtggaagctggtagatacacaccaacaggtggtaatagacagcctataagatacatattagtaaaagaaaagctaaaagaagtgaaagaactggcaatacaaggtctttataatttggcattagatactgatgacaatgaccctgtacgttctatctataaaaatacatttaagaaaatgtacaaaagatataaagagaacggaaatgattctttattttatgatgccccactacttatgatagttgtaggtgatatgtctctaggtggaagtgcttatgtagatggaggattggctgcatctaatatggaacttatggcctattctcaaggattaggaatttgttataatggattttttgttatggcatcaaatgtagagccaaagataaaagaactgttaggaatgagcgagaacgaagcagttatcacttcatttatattgggttatccagatgtgaaatataaaagaactgtaaatagaaacactgctaaatttgaaatgagatagaacttaaacttcattacaacttgtaaaattatgggatatagagtaggtatttagcagggtaaatttgttgtaatagatatataaatgagttataatttaaatatattgtatatattaaggatatttaaatttctaagtagatttatatatccttttatatactaatctattttttcatgtctacaagtttatgcagtaatttatactgtaaatcttaactatatggaggattgtgtagtgaatttaaaaaaattacttttattaattattgtaattacatctatattcacttcttgcatattttcttttggtatcaatgctataggtaatgataatcgtaccattcgtgttgcttatcctattcaaaaaggtttaactgaaatagatgagcaaggtaactattttgggtatacatatgaatatttgctagaaattgcacagtatactggatggaattatgaatttgttcaagttcctggagagataaatgaatctattacaaaattaatgaagatgttagaaaatggtgaaattgatataatgggaggtatgttatacaatgagccaatgcaaaaaatatataattatgcgggaaacagttatggagtagcaaatacagtactacaagcattatatgaaaatacagatattgataacataatgagttcgcaagatgtgaaaaaaattcgtattgctgtaatagaaaattctgatactaggcttaaagaattagatgagtattgtaaaatgaatcttatgtcacctgaattggtatattgtaaaacaagtgacgagcaattagaagtactaaagagtggtaaagcagatgtacttcttaatgttagtatgaacccaatagaaggtgtgcgtactgtagcaaaattctcatcaaagccattttatttcattactccaaaaggcagtacagacttaactcaaaagcttaattcagcaattaataatattgaacagaaggacccatatttttcaactactttatatgagaaatactttacgccagagaataatcaaatgtttttatctgatgaagaaactaattacattaaagatacagaaaaattaaaagtaggagtacttttaaacaaaccaccgtttcaaaatgcagataaagatacaggagaattaagaggtatatcaattgatttgttaaatcatatatgtgataaaacaggtttggaatttgaacttgtgcctgtaaaatctcaagaagatttggaagatatggctaaaaaacatgaaattgatattgtagcaggaatgatttatgattatgagtactctcgtgaacataatatagctatgtctcggccttttctttctactcaatatactatgatgattaataataaattaaatgagaatagtctaaatggaaagcgtatagctctagccaaaggtattgattattatggtcagtttgaagaaaatatagtttggtatgataatttagaagagtgtatagaagctgttaataaaggctatgcagattacacttatggagaaggttattctatgcagtactatatgaatcaacctaagtataaaaatgtgcgcctagttcctcaaacttatgaagcaaagagtatttgttttggcataattaaaaaagataaacaagaattattgaatatatttaataaagctattataagtatttcatcagaaaaaatgcaatcaattgtctaccaaaatactacatatagacaagatttctcgttgctttatattatgcaacagaatccaattgagactatttttattgtagcaagtttattaatttgtattattggatttatggcatttggtttacatactcgtacaagtatgaacgaaaagatatctttggaactcaaaaaacatactcagttgtatgaaatgacaagtgaatacttttttgagtatgattataagcaagataaattgataatttctatgccagaaaagggtattgagacttattatggtttggataaaagtgataaggaaagtgaaaatggcaatatagaaaatgaaagagataaaataagaagagaatataataaaaagttttttgatgtaataaaatcacaagaaaatgggactactgaaatgtattctatcatgcttgatgatacttttcattggattagaattacttcaaaaataatttataatgatagaaaaataccaatgtatgtaattggtaaaatagctaatattgattctgaaaaagaggaaaagaatagattgttggataaagttcaaagggatagtttaacaaatatttataatgcagcatatattagaaaattaactacacaaaatttattaaatttatcaactgaaaaaaatggagctttattgattatagatattgattattttaagtcaattaatgatacttatggtcacctggtaggagataaagtactgattgatgttgcaaaggtacttgatgaaagttttgcaaaagatgatatagtaggtcgtttaggtggagatgaatttagtgtttatataaatgatataataaataaggaagaacttatcaataaatgtaatgatgtatacaatcatattcatctcattaagttgccaaatggagaaagtttatctattagtatgggggtagttataacaaagcgtggtcaagagtatgatgaactgtatcaaatagcagataatgctctttatgattctaagagacaaggaagaaatagatttaaaatagtataagaattaattttaaaacagaataaagtttaataatatttaaattacaataaagcctaatgatacatgttattatctatcattaggctttatttctataagttaatattgaaagtaaatattatactaacagtagtattaatttacagagttaattttatatagattacttaaaattaaaatctatttagaatcaaaacttaaatttaatattggttcatagattttaatatttcaataacataatcccaaacattagctacagaagggatactaacatgttcatttggagtatgaacatcaaacatatctggtcctatagagatagcttcagcatgaggaagtttatcaagtaataatccacactcaagaccagcatgtagagccataacagtaggaactttaccagttaatttctcataagtttcactgcatattttttctaattttgagccttttttaaattcccaagctgggtattgagctataaggtcgtaattagcacctaaagcttgagccaaaagtcttattctatcagcgatttcatctctaatagacataacagaacttctaacagaagttaaaaattcaatagtagattctttagtttcaattatagcgaagttagtagaactttcaactaatccttctatatcaagacttactgattgaactccatgaggagttaagcaagacatttgaacaactttttctttacaatctttagtaagaactttgtctacagaagtttcagctactgagtaagtcatgccagggtcagaagtagtaaactcatgtttaaatgcagttaaaatgtcatttatttgttttttagcagattcaacatcagctttattaacagctattacacatttagcttcacgaggtatagcattgtgcttagtaccaccatcaacagaagctaattcataatcaacattcaatacacttaatactctagctattgctttgttagcatttgctctttgtaaaacaatttccataccagagtgtccacctaatagtccagtaacctcaactaataatccttgtttgtcacctttaacttccttgtattcaacaggtaaactaacaacacaagttttaccaccagcacagctaactaataagtatccttcctcctcggagtccatatttaggatatattgacctttaattaagctagggtctagtgcatctgcaccattcataccatcttcttcattaacagtaactaaaacttctagtgcaggatgctctaaagtattatcttctaatatagccatacccatagcaacagctataccattgtcagctcctagagtagttccagtagcatatatcatgtcaccatcaattcttaattttatagggtctttaagaaaatcatgttcaacattcttttctttttcgcaaaccatatccatatgtccttgaagaactacacctggacaattttcatatccttttgtagcaggctttcttattattatgtttaagctttcatcctgaatagtttcaagacctaaatttttaccaaagctaagtaaaaaatcacttatgcctttttcatttccagaacctctaggaatttgagatattttctcaaagtttttaaaaacactttctggttttaatccttctaatacgtttcccatgactcatgttcctccttaatttatctatataagtagctatttttttataagctaaaataaactcctttaaaaatattaaagaagattttttaacagattatattacaaataaagcatgtttatgtataatatatagatagctacatacatagtataatacaaaatatgtgtaaaatatatctaaaagagaaaaaatataataattttagaaatgaaaaagaaataaaacttgcattttttattggaaatgcttgaaaacatacatttttaaaattaaataaaaaagttaaaatatcgaggatggtgaatatagaaaatgaatgagaaatcgttaagagttctagaatacaataaaataatagatttgttaaagaagaaagcctcatcttctttaggtctaaaatatatagaaaatttagtaccaaatactgattttgtagaagtgaaatctatgctagaagaaactagtgaagctcaatcaattattataaagagaggttcagtagggttggaaggtattcatgatatagaagataaggtaaagagagcttatataggtgcttctcttgacccaggaagtctgattatgatagcagataccttaagagtggctagaagattaagaaatagcttatctagtagtgatgaagaagattttaattatccaataatacaatctctatcaaattctctatatgtgtacaaggacatagaagaccagatatacaatgctataattagtgaagtagaaatatctgacaatgcttcaagtacacttagagatatcagaagaagaatagcccaaaaaaatcaatccattaggtcaaaattaaattcaataataagttcaactacttatcaaaagtacttacaagatgcaataatttctctaagaggtgatagatttgtagtacctgtaaaatctgaatataggtcgcaagtagctggtatagtgcatgaccagtcatcttctggtgcgacactttttatagagccaatgactatagtagagatgaacaatgaattgaggcagttgaaactaggagagcaagaggaaatagaaagaattttatcagagatttcagctatggttggagaagtgagcgaagatttaatctctaatcaagagatacttggaagattggactttgcattttcaaagggaaaactttctatacagatgagaggaatagaaccaactttaaatgaggataaatatttaaacataaaaaatggaagacatccactgctggataaaaagaaggtagtagcaaatacaatttatttaggaagagacttccatacattggtgataacaggtccaaacacaggtggtaagactgttacaataaaaactgtaggtctatttgcacttatgacacaaagtggacttcatatacctgctgattatggaagtagtatgtgtgtatatgataatgtatttgcagatataggagatgaacagagtattgaacagagtctatcaacattttcatctcatatgacgaatatagtatctatattacaaaacgtaacagcagactctttagttatatttgacgagttaggagcaggaacagaccctgttgaaggagctgcccttgcaatagcagtattagaagatataaattctgtaggagctaaatgtatagctaccactcactatagtgagcttaaaaattatgctcttactaaaccaggtgtagaaaatgcagcagttgaatttgatatagaaactttaagcccaacatataagttacttataggtgttcccggaaaatcaaatgcgtttgagatttctagaaaacttgggctaagtgattatgtgatttcacgtgctaaagaatatataaatacagaaaacatagctttagaagatgtgttacagaatgttgaaaagaatagaatcaaagcagtagaagatagagaagaagctgaaagattaaaagaagagattgaaaaactgaaagtagagtatgacgaaaaacttgaaaaattggtcagtcaaagagataagatgattgaaaaagctaaatcagaagcattttcaattataagacaagctaaagaagaagtagatattataataaaagaacttagaaatcttgaacaagaaagagcttcaaaagaaaagaatcgtaagatagaagaacttagaaaagaattgaccagctctatgggaagtcttcagccaacagtaaaaagtatgatagttccaaaggtatcaaataaggagataaaagacttaaagccaggtgaagaagttaaggtaataactttaaatcaaaatggtagtgtagtttcagtagataaaaagagaaaagaagcagtagtgcaaattggtataatgaagatgactctaccttttaaatctttacaaaaaacacgcaaagatgtttcaacaaatgtaactaaatcaacgagaaacattataaggtcaaaatctggtagtgtaaaaaatgaagttgaccttagagggttaaacctagaagaagctataatggaagtagaaaagtatcttgatgatgcatatgtggcaggtttagagtctgtaacagtaatacatggaataggcacaggagtattaaaagcagggctacaagacattttaagaagaaatagacatgtaaaatcacaacgaggtggtcaatatggagaaggtggagcaggagtaacaattgttaaattaaaataatttgtataagaatacattagtaatttgtataagaatatattaagaatttgtataggagcacatttttatgatattggtatctgcatgtttaataggaataaattgtaaatatagtggcgataataatgaaaatgaaaaagtcaaggaatatttaaaaggcaaagaatttacacttgtatgcccagagcagttaggtggtctatctacaccaagaccacctgctgagatagttgatggaaaagtaattactaaagataataaggatgtaacagaaaactttgtaagaggggctaatgaaactctaaaaatagcaaatttatatgtatgtagcgaagcaatactaaaagagggtagcccctcttgtggatgtaatctaatatatgatggtagtttttcaggtaaaaagataccagggaaaggtataacagcaaggctgttagaagaagaaggaataaaaattaagagtgaaaaagatttatagaaaatagataaaagagtaaaaaaagtatataaagctaatattgatgtataaaaatagataaaagagtaaaaaaagtatataaagctaatattgatgtataaaaatagataaaagagcaaaataaatgtatataaaattaatattgatgtatgaaaattgataaaagattaaaaaaagtatataaagtcaactggatagtacaagaaacaataaaatagaaaaaagtcttataaaaaatcaataatagtgtgattaaaaactgcaattatagtatttttaatatatacagaaaacataattattaaagtgttttacactgtaatgaaatacttgaaaaaacacgaaatttgatttaacataaagagataagcacaatataaaccaggaacaatgtagagaggagcaacagaatgcaagattttaaggtggcaatatcaaattgccttaaagaaaaaatagaagatttatcgaaagaagagatagaggcacttatagaagttccaccaaataaggatatgggggactatgcttttccatgctttaaattagccaaagtgtttagaaaagctccaaacatgatagcaagtgaattggcggaaagtatagaaccaagtggagagataacaaaagtaatacaattaggcggatatgtaaatttctttgtaaataaatctcaattagcagaaactgtaattaaaaaagttttagatgaaaaagaaaattacggacatagtgattttggaaaagataaaactgtaatagttgaatattcttctccaaatatagcaaaacctttccatatagggcacataagaactacagttataggtaatgctttatataagatatatgattcgcaaggatacaagactataagaataaatcatttaggtgactatggaactcagtttggtaagttaatagtggcctttaaaaagtggggagaaaaagaagtagtagagtctaatccaattccagaattactaaaattatacgtaagattccatgatgaagctgaacaacacccagaaatggaagatgaagcaagagcatggtttaataaattagaaaatggtgacgaagaagcacaagaattatggcaatggtttagaaatgagagtttaaaagagtttaacagagtgtataaacttttagatatagaatttgattctttagcaggagagagtttttattctgataaaatgaacagagttatcgaactattagaagagaaaaatcttttaaaagagtctaaaggagcaagaattgttgatttagaagagtataaaatgccaccagcacttattactaagaatgatggttcaacgttatatatgacaagagatttagctgctgcaatatatagaaaagagacttatgattttgacaagtgtatatatgtagttggttctcaacaaaacttacatttccaacaatggtttaaggtaattgagcttatgggatatgattgggcaaaagatttaattcatgttggatttggtatggttgcacttgaagaaggtactatgtcgactagaaaaggaagagtagtatttttagaagatgctttaaatcaagctatagataaaactaaggaaattatactagctaaaaatccaaatgctaaaaatgtggatgaaatatctaagcaagtaggtgttggggcagtagtattccaagagttatctaacagtagaattaaagactataccttctcttgggaaagaacgcttagttttgatggtgagactggaccatatgttcagtatacacatgctagatgctgtgcagttttaagaaaagcagaagtagaagtgacttctgatatagattatagtctattagctgatgaagatagtgcagaagttcttagagttatagaatcattcaataagaatattttacttgctctaaagaaaaatgagccacatatagtgactagatttatgttagatttagctcaagcgtttaataaattttatcatgacaatccaattttagtagaaaatttggaaataagaaaagcaagacttgcattagttttagcaacaaaacaaactttagaaaattctctgaaattgttgggaatgcacgctccggaaagaatgtagcatgataaaatgttgaaataaaaagaataaaattgaacttagtacgcaatttgtataactgtaaaatatagggatgtcgaaaactgatgctttacatataaaaaagtagtatcgtataataatatatagatagtagattacaatgatttttgtacactactatccccctatatatgacagcttcttaaacgggctgtctctttttttttaataacaatttatttacattcaatttttcagaaaggatatatttatgaatgacgaattactaaaaaaagtctacacatcttcttttagtagtgcaagtagggctcttaaagatttaactataataaatacaaaatccttaatagatgataaaacgcaaagatgtgtgtatatagacgaaaatagactgagagatgaacttatttactatagattttatggagaaaaaataggaaatatcaattttttaaatattttactaccactaattttatcaaatactaatattcaaaaaagcgaagatgaggttattaaactaataaaaaagtatgttatttattttaaaaaagaagaacttttatttgattatttattaggttctgtagtgtataattccattatgcacaatcttataaataatagtaaaatagagtatgtcgaattactacagagtattaaagacaagataataggattttctatagaattagacaaatcagatgttgtaaagtttcagatggcaaggattaaagcaatacaattaattgataagtacattgatttgaaatctgaagattatgatgaagaaagtattttattaaatgttttaaatgttctatatgatgtatatatggaagatagaactgtagaaaatgaaggaattaatagcataaaaaaatctatattatccattttgggtgaagatagtaaattaaatgaagataatatagattttattttttctatgtccgaatatgttgttaaattgagaaaatataaaattggagttaaggcatataataaaagcatagacccaagaagtcttataagacttgaagaaggtaatactataatagaccctatatttaatcaaataacagttatgtcgaaaacctttaatgataatatattaagcataaaaataaattctaaatcaggtatttatatattaaagtttaaaaaggtttaggttattagagtgtgctatttttttctagataatctaaaaaatctttttccttagtgtcagttaaaaaacataattcctttactatattattcctaaggtcaatgaaatcactaatttgagtattttcattagtgtattcaagagactttataataagtagtaaatctctttttgataaagagttgatagatactttttcaattaattccataaaaaacttcctttcctcacattacttgaaattaataaattaattatatagatattatttagactttacatatactattttaacctataaggggtacaaaaagacagtataatcttaaaaagaggtgagaaatatttgaaaattttattaacaacattaaattccaagtttattcatacaaatttggctataagatatctaaaagaatttgtaagagatttgatagaagttaatatgaaagaatacacgataaacaacgatttggactatattttaaaggatatatataaaaatgaatatgatataatattattctcaacatatatctggaatgtgggagatatagttaaactttgtgataatctaaaaaaaattagacctaatactaaaatagctttgggcggaccggaagtgagttatgatagttatgaggcaatgaaaaagtatgattttgtggattatatactttatggagagggagaattaatttttagagacttagtacttcacttgcaaggaaagatgaaaataaatgatgtaaatggacttgtatatagacaaggcaatgagataatagtgaataagcctatggaattacttcaagatttggatgagattcctagtccttatgaaaacttgaatccaaaagaatatgaaaatagaatagtgtattatgaatcatcaagaggttgtccttttaactgccagtactgtttatcatctactattccaggtctaaggtattttagtttagacaggataaagagtgatttaaaagctttaatagatgcaagagtatcacagataaagtttatagataggacattcaatgcaaatagaaaagtggctatggaaatcatggatttccttatgaaaaatgataatggatatacaacttatcattttgaagttacagcgtatttgatagatgataagatgcttgagtttttggctgattgtaaagaaggtctttttcaatttgaaataggggttcagtcaacgaatgaaaaaacacttgatgcagtaggtagaagggatgattttaaaaagttgtctcatgttgtacaaactgtagcatcttatagaaatatacatcagcacttagacttaattgcaggactgccttatgaagattataagagctttgaaaattcttttaatgatgtatttaatctaggtatagagcatctgcaattaggctttttaaagatgattaaagggacaggtatgagaaaagttgcagatgagcatggttttaaatataaggattatgctccatatgagtttttatacaataattatataagctatgaagaaactttgaagctaaaggatatagaagatatactggagagatactacaattctaaaaactttgtgttatctatgagatatattataggcagattttataaacaaagtccttttaaattctttgaggtttttgccaagtattttgatgaaaatggctactttgatttggcacaaggaaagaatcagttatataaaatattgatggatttctataatgaaaaaatcaacatagataatgatgtattcaatgatatattaaaatatgactatatatcactgggtaaaacatcaaatataccacagttttttaataagctagatgtggatgattttaagaatagatgccatgtatttttacaagataatgataacttatcaacatatttacctagttttgttgataaaccagctaaacatataataaaatatgttcattttgagccatttagatttaatgttgtggatttaaaaaatgatataaatacagaaataagagaagtagaaaatgtagtcttatttgagtatgatgataaaaaaatatttgagaaatctaaaactcataaagtagagatttaagtatttaggaggataaaatggattttaagatagaaaaatatttgctaaaaaaagcagaagaattagcttttataactataaaacatggtggagagtttaaattaaaaagctataaagtgccaaaaggcggattagatgtacctataaaaaatgaggtattagtaaaagggataaaagaaaagactgctcaagataagttaaattcaatgtctatagcagatgcaatgatatatataattggaatagatagtaagtttaaaaacaatgcagagtatgagaagtttttaaatgctttatcaaaagatattgatttggatttgaaatcgtatatgggatatatgtcgagaaaatactttgagattggtgaacatacagattctttaatatatataaaagcatttataacaatgtatccagatgatttagatgcaatgtataactatgcgattgtttgccaagagatagctaaacagtatcaaaaagatatggatgataaggcaatgaatgcattcttacttgaagccatggctaagcttgaaaaggtaattgatgttgatgagaattttgcattaggttattatcacttaggctaccattattataatcaaggtcaatatttaaagactaagctgacttgggaagaagcattaaggctagggttagatgctgatttagtagctgaggtacaagagaatctaggcaagatggactttaaagttcaatatgaagaaggatatacacttgtattccaaggtaagtttaaggaaggattagagaagttacttccattagaagaagaacatatggattggtggaacttgctgtttatgatagcacttggatataagggtatgggcgaaatagagcaggctaagatgtatcttgagaagatattgataataaagcctaatcaggtggatactatagtggaattggggctttgtgaggcttataagaataatttagataaagcaatagagtattttgaacaagcggctaagataaaggaagacccagaaatactttgcaatttaggaatggcttatttaaataatggtgatattgatgatgcaacttactatatagaaagagcttatgaattaaatccacaagatgaaattactattgcttgtctaagagaacttggaataaataagtaaggatattgttaggttgtatttaattttatcggttaagtggggctatctcaaaatagagataagcctcttttttgtatgaagagttccaggagttactattggagataatgcaattatcgctgctggagcagttgtaacaaaaaatactattgtaggtggtgttcctgcaaagcttttaagagctattgatgaaatcccagaataaaatattaaactgtcttttagtcatataaattctttataacataaaaaataaattgagaaaaggtatagcaaatatggtattatttagttaaatatatataagggaggggttacttttgataaaaaaattagatgatattttagaacaacttaagggaggagagaaaattgtactctctgtagcagcagctcatgataaagaagttttaatggcaataaaggatgctgtagaaagaaatataattactcctatattggttggaaatgaaggcaaaataagagaaatatcaaaagaaataggatttgatttaagtggtatcaaaatagtggataaggatgatatcaaagagtgtgcagaaatagcagttaaattagtatcaagtaaagaagccgactttgtaatgaaaggattattagatacatctgtcatattaaaagaagtgttaaataaagactatggtcttagaactgatagtttattaagtcatgttatggtatatgagttagaaaaataccataaattacttataactacagatggaggtatgaatatagctcctgattatgaacaaaaggcaaagatattaaaaaattctataaaagctgcaaaagctttaggaatggaaactgtaaaagttgcatgtttggcagctaaagagaaagtaaatcctaagatgcaagcaactgtagatgcagatatgttagcaaaagcttgtaaagaaggagaatttggtgaaaatgtaattgtagaaggtcctctggcttttgatttagctgtttcaaaagaagctagtgagataaaagggtttaaaagtgaagtatctggagatgtagatatcatattggttccaacaatagaggttggcaatggaatagggaaagcctttacatatatggcagactctaaatcagcaggtataattatgggtgcaaaagctcctatagttttagtgtcaagagctgattcacatgaatctaaattatattctattgcatatggggctattgtagctaaaaatatgaaataggataaatcgcttgaaataaatgaattaaagtagaaaaaatagtcaaaatgtctaaattaatgctgtattaaaaaagttttatataaaaaataattatagcttcaaatgaatatatacaaatgttcaatttgaagctataattaatattaaagtaggaaaaataaaaaaattcaaaaaaattagtccaaaaaatgctattctaagaagtttttactaattaagtttagggagtaaaaatctgtaataagtccaaacagtagtgaaagataataaatacacaaacaatctgcaataatataaaaatgactagaaaaatttcaaatttgatttaaaaaaatcaaaacataatttaattaaactgaagtatcaaaaaagtaggtttagatattaacaaatagccaaaaacaagcgataaaatcaacttaaattaagtgtagaaaataaaatttttatgtattatctaattttgttaaaaaaatatttaaatctaaagcaaagcactgaaaattagtatataatcaacttagaaagcatttattttattattttatgacatgaagtcagtcacctgggggattttaaaaatcaaaaaaaggggataggaatatggatgaaaaaatgttaacaattgatttaaacagccagaagatgatagctaaagctagagaagaaggcgtagaaacaatgtatgatagaaaagaaggctttaaggcacaatgtggttttggtcttcaaggtgtttgctgtagaatatgtggaatgggaccatgtagaataagccctaagactccaagggggttatgtggagcagatgagcatactatagtaggtagaaactttgcaagaatggttgctggtgggacagctgcccattcagaccatgctagagatatagcacatacattagcattagctgatccaaatggaaactataaaataagagacgaagctaagttaattactttagctaaagaatgggatgtagagacagaaggtagagatatctatgatgtagcacatgaagtggcagaaattgcattaatggaatttggaaaaccttttgggacattaagatttataaaaaatgcaccagaaccaagacaaaaaatatggaaagaatacgctatagagccaagagctatagatagagaaattgcaacaataatgcactctactcatataggatgtactggtgatatagatagtttaatacacatgagtcttagaacttctatggctgatggttggggtggttctatgataggtactcgtctaagcgatatcttatttggaactccagtgccaagaagaacagaggctaatttagcagtattagaagaaaataaagttaacataatattacatggacatgagccagcattatcagaaatgatagttttagcatcagaagagccagacttagtagctttagctaaagaagttggtgctgatggaataaacttagcaggtatgtgttgtacaggtaatgagattacaatgagacatggtgtaaaaatagcaggagacttccatcaacaagaacttgcaataataactggagcagttgaagctgtaatagttgacgttcaatgtatattccctgcattagctagagttgcagattgttaccatactaaatttgtaacaacttctccaaaagctaagataacaggttcaacttatattgaatttagagaagaacaagcacttgatgatgctaaagcaatagttaaagaagctattttaaactttaaaaatagagataaatcaaaagtacttatacctgaattaaaatcaggcgcaacagttgggtatagtgtagaagcagtagtaaatcaattagacagagttgtaaactctcatatagacccagcaggaacagttaagccattaacagactgtctaaaagctggagtattaagaggagcagctggtgtagttggatgtaacaatgctaaaggagtttcaaatgaggctcacgtaacaataatgaaagaattaatcaaaaacgacataatagtagttactacaggttgtggagcttcagcagcagctaagtttggtttaatggaatctgatgcggctgaaaaatatgcaggtaaaggtcttgcaactgtctgtaaattagtaggaatcccaccagtactacatatgggttcttgtgttgatataagtcgtatactagatttagttggagcagcagctaattacttagatatggatatgtgtgaccttccagttgtaggtatagctccagaatggatgtcagaaaaagcagttgctataggatgctatgttgtagcttctggtatagacacttatttaggaataatgcctccaatagctggttcttcaagagcagtggatatattaactagtgagttaaaagataaagttggagctacatttactgtaaatacaaatccaaaagagttagcagctacaataatagaagatatagagaaaaaacgtgttcactttgaagcattagttgaagaaaaaatggcagaaaaggctgaagcttaaaaaatagtgaagttatagaataaacgtttttataagaagtttctggttgagtaaagttgaataaagtcaaatattaaagtaaagaacatcgaaatataatgaatatactgaataaataaaatataaacaatattaaagaataataaaactatacatgctgctttgaaaagctagtagggtaaatttaattggttcctgtaaggactagctgtagtttatttttagtgtataaaaatatagagtataaaaaatatttaactgtaaaattaactactaaaaagcaaatagtaataaaaggtggtagggattatgaagatagcaataacaggtaaaggtggagtaggtaaaacgactttttcttcaatgctctctaggatgtttgctgaagacggatacagagttgttgctgttgatgccgaccctgatgctaatttagctttagcactaggttttccaaaagaagtatatgaatcaatagtacctatatcagaaatgaaaaaattagtttcagatagaacagctgcttctgtaggttcatttggaaaaatgtttaagatgaatcctaaagtagacgatatccctgaaaatttctgtaaagaatacaatggagtaagattacttacattgggaaccgtagattctggtggtactggatgtgtatgtccagagcatgttcttttgaagagactctgctcacatttaatactacaaaataaagatgtagtggttatggatatggaagcgggaattgaacacttaggaagaggaacagcccaaggtgtagatgcttttatagtagttgtagaaccaggagagagaagtctacagacttatagaaaagttaagaaacttggacatgatataggtgtaaataaagtatttgtagtaggaaataaaattagaaataaggaagatgaagaatttataatccaaaacttagaagatggagaatctttaggatttatttactataaccaagatgttattgattctgatagagctaatcaatctccatatgattctagtgaaacaacgaaagaacagattaaagcaataaaagataaattaatgtcacttaaggataaataaaatagatagaaattttgatttgggattttaagttggttaaaggttagacataggcaatagataggtaataagtaagtaattagataaataactagctattaagtttgaatattttaatagcttagtagctagtttttaagtaattttacatgtataattatcttataaaatataatttttacatattaatacaatttttacaaaaattatattttaaatctatttaggttgtgggaggagattcagttatgggatttaaatctgacattgaaatagctcaagaagctaagcctcaagatattagagaggttgcaaaaaaattaggactaggtgaagatgatgtagaactttatggtaaatacaaagcaaaagttgactacaatctactaaaaagagagactggtaaaaaagctaagttaatactaactacagctataaatccaactccagcaggtgaaggaaaaactactactactataggtgttgctgatgcatttgctaaactagacaaaaatgtattagttgctttaagagaaccatctctaggaccagtatttggtgttaaaggtggagcagctggtggaggatatgcacaagttgttcctatggaagatataaacttacacttcacaggagattttcacgctataggagctgctaacaatcttttagctgctatgcttgataaccatattcaccaaggaaatgcacttagaatagaccctaagaaaataacttggagaagatgtgtggacatgaacgatagacaacttagaaatatcgttgatggtatgggtaaaaaaggtgatggagcagttagacaagatggattcgatataactgttgcttctgaaataatggcagcgttctgtttggcaagtgatatatctgatttaaaagaaagattaggaaacataatagttggatacagctatgaaggtgaacctgtaacagctagacaattaaaagctaatggtgctatggctgcattattaaaagatgctttaaaaccaaacctagttcaaactcttgaaggaacaccatcatttgtacacggtggaccattcgcaaatatagctcatggatgtaactctgttatagctacaagaatggctatgcactttgcagactatgtaataactgaggctggtttcggtgctgaccttggagcagaaaaattcttagatataaaatgtagaatggcaaacttaaaaccagatgctgttataatagttgctactgtaagagcattaaaatacaatggtggagttgctaaagcagacttaaataacgaaaacctagaagctcttgaaaaaggacttccaaacttattaaaacatgttgaaaacataactcaagtatatggattaccagcagttgttgcaatcaatagattcccacttgatactgaagctgaacttaaacttgttgaagacaagtgtaaggaattaggtgttaatgttgctctttctgaagtatgggcaaaaggtggagaaggtggaattgcagtagctaaagaagttttaagattattggatgaagaagaaaataactttagattctgctatgaagatgatttatctataaaagacaagataaatgctatagctactaagatttatggagcagatggtgtagattatactcctgaagctgataaggaaatagctaacttagaaaaacttggatttactaaagttccagtatgtatggctaagactcaatattctttaactgatgaccaaactaaattaggtagaccaacaggatttagaataactgtaagacaagcaacaatttcagcaggagctggatttatagttgcacttactggagaaataatgaagatgccaggattaccaaaagttccagcagcagaaaaaatagatgttgatgaaaatggagtaatagctggattattctaaggaaattaatttataaataaagagtaggagatatcttaaaatagttcgtaaaatatctcgaataatttgagatattttcctacatcctttcaaggaggattatcatgaaaatagcagataaaacttgtgttgattttgtagaagtactatcttccaaagaagcagtaccaggtggtgggggagctgctgcactagtaggtgcaataggtatggctttaggtagtatggtatgtaaccttacaatagggaagaagaagtatgctgagtatgaagaaagcgtaaaagagatattaagtaaggcaggaaagttagaaaaagatttattaaaaatgatagatgatgatgcagaatgtttcttaccattatcaaaagcttacgggcttcctaaagaaacagaagaagaaaaaagaataaaagcagaaacaatggaaaaggcattaaaagttgcttgtgaagtaccattaaacatagtaagagtttgctatgaagctattaagttacatgaagatttagttgataaaggttcaagacttgctataagtgatgttggtgtaggagttcagtgtttaagagctgctatacttggtggacaattaaatgtagttataaatataaattctatacaagataaagaatatgttaataaggtaaaaatagaagtagataagttagttgaagatggtgtaaaaatttgtgatgaagtttatgccaaagttgaaaaagctcttggaaaataatttttaaatgacgaaagtagatactatgttattaatatgtggtatatagaataaattaatttaagtttgcttgtaggggagttgtgaatgtatggaaggaatgtcaactaaaggacaaattataaaaggaaaacctgtagctgataaaattagtgaagaattaataaaagaagtcgatttactagttaaagaaggtataaatcctaaactaacaatagttagagttggggcaagaagtgatgatttatcttatgaaagaggagcactaaagagatgtcaaaacataggtataacaacagaagtgttagagttagctgaggatataacacaagaggaatatattgatgtattaaagagagttaatgatgacaaaaatgttaatggtatattatgttttagacctcttccaaaacacttaaatgaagaagttataaaatatgttattgcaccggaaaaagacgtagattgttttagtccaataaactctgctaaggtaatggaaggggataaaagtggatttccaccatgtacacctacagcagtagttgagatattaaaacactataatgttgatttaaaaggaagtaaggtaacagttcttggaagatcaatggtagttggaaagccagtatcaatgcttttattaagtgaacatgcaactgttacaatatgtcattcaaaaactaaaaatctatcaggtgtagcagcagaggcagacgtgctaatagcagctattggtagagctaagatggttgatgaaagttttgttaaagatggagcggtagttatagacgttggtataaatgttgatgaagaaggaaatttatgtggagatgttgatacaaatgcagttttagacaaagtatcaatgataactccagttccagcgggggttggttcagttacaacatctatacttgcaaaacatgtagttaaggcttgtaaattacaaaacaataaatagagatatatatgtggaaggtttaggggggaagtagatatgataatttctgaaaataaaccattagaagaagtgctagggtacttaaaggattttgacaagctggttttagttggttgtaatcaatgtgcagcaacttgtaaaagtggtggggaagaagaagttttaaaaatgaaggaaactcttgaaggtgaaggcaaaaaaatcttaggatatgtaatgcttgaccctgcttgtaaccttttaaagtctaaaaaggatttaaaggctctaaaagaagagactaaggaagctgatgcagttttatctttagcatgtggagatggtacacagacaatagttaagaatttaaaagataagccagtttatccagccaacaatactttgtttataggggaagtacaaagagttggagaatatgaagaagcctgtaaggcttgtggagactgtgaacttggttggacaggtgggatatgtccagtaactatgtgtgctaaaggtcttatgaatggggcttgtggtggagctaaaaatggtaagtgtgaagtaaactcagagaatgattgtgcttggataaagatatatgaaagactagaagctataggacaattagataacttagcagaaataagaccaccaaaagactattctaagcaaaataatccaagaagtttaagtgcaaagaaaaagaaagaagcagcagcaaattcataaaagttttttttagaaggttaaaagggggattagagatgagcttattaagagaaacattagaaagtggaaaatttgcagttactactgaaatggctcctccaaaagggactgacctttcacatttaatagaatgtgcaaagccgttagttggaagagttcatgcagcaaatgtaacagactttcaatcggcagttatgagagcaacttctcttgctacatgtaaattattaaaagatgctggattagagccagttattcaaataacagggagagatagaaatagaatagctatacaaggagaaatgttgtcagcaggtgtatttgggataaacaatttgttggcactaacaggagaccatactagcgtaggagaccatccacaggctaagggagtgtttgatttagattctgtggggatacttcaaactgctgagactttaatggcaggtacggacatggctggtaataagttaaaaggttctccagatttttatctgggagcatcagtaactccagaatattctccaatagaagttcaattattaaaaatgcaaaagaagataaaagcaggggctaaatttttccaaacacaagcactttatgacataaatacaatgagaaagtttagagaattaacaagggatatggattgcaaggtattagcaggaatagtacctttaaaatcaccaggaatggctaaatttatgactgcaaatgtaccaggaatattcgttccagatgaacaaatcgaaagattaagagcagctggaaaagaaaactgggtaagtgaaggaataaaaatggcaggggaacttatcaaacaattaaaagaagaagatttatgtgatggtgttcatataatggcaattggggcagaagagaatatacctgctatactggatgccgcaggtttatagtattgcaagattgtagattatattaggtttgggggaattaaggatgaagatagtagtagtaggtggtggaccaggaggatatgtagcagctataaaagcttctatgcttggtgcagatgtaacggttattgaaaaaagaagagttggaggaacttgcttaaatgcaggatgtataccaactaaagcacttcttgcttcttcaggagtattgaatactgtaaaagaagcaaaggattttggtatagaaatagatggtacagttaagccaaacttcactgccataatggaaagaaaaaataaagttgtaaaccaattaataagtggtatagagttcttatttgaaaaaagaggagtaaacttagttaatggttttggaaaattaattgataaaaacactatagaagtaactaaagatgatggaacagtagaaactataaaagcagataagataatactagcaaatggttctgttccagttgtaccaagaatgttcccatatgatggaaaagttgtaataactagtgatgaagttcttggacttgaagagatacctgagtctatgttaatagtaggtggtggagttataggatgtgagatagggcagttctttagagccttaggaacagaagtaactatagttgagatggttgaccaaatactattaaatgaagacaaagatgtagctaaacaactacttagacaatttaagaaagataaaattaaggttattacaggtattggagtacaaacttgtgaagtagttgatggtaaggcggttgcaactctttctaatggaaaggttatagaagcacaatatgcattagtatgtgttggtagaagacctaaccttgacaattctggagtagaagatataggaattgaaatggaaagaggaaaagtagtagttaatgaacatcttgaaactaatgtagaaggtatatacgcaataggcgatataatagatactcctttcctagcacatgttgcttctaaagaaggtatcgtagcagttgaaaatgctttaggtaagactaaggtagtagattatagagcaattccaagatgtgtttatactgaacctgaagttgctggtgttggtaagactgaaaagcaacttgaagctgaaggtgtagaatacaatgtaggtcaatttgattttagaggtcttggaaaagcacaagctataggacatttccaaggatttgtaaaagttatagctgacaaagaaactgataagataataggtgcagcagtagtaggacctcatgctacagatttattgacagagttgtcacttgctgttcatctaggattaacagtagaacaagtaggggatgcaatacatccacatccaagtttatctgaagggctaatggaagcacttcatgatgtacatggagaatgtgttcattctgtacctaaattataatagacagacagagtacataaggctctgtggctagatttaagggggaagtcttaaaatgggatacaatatagctgttgcaggaaaaggtggaactggtaaaacaagtctcacagggcttttaattgattatttggttaaggacaaaaagggaccagtattagttgtagatgctgatgccaatgctaacataaatgaagtgttaggtatcgaagttgaagcaacaataggagaaataagagaagaagtaaatcaaagagaaaagttaggcaatgcattccctggtggtatgacaaaggcacaatatcttcaatttagattaaattctataatcgaagaaggcgaaggatatgacttattagtaatgggtaggtcagaaggtgaaggatgttactgttttgtaaatgggatacttagagaacaagtaaacaaaatatctggtcattacaaatacttagtcatggacaacgaagctggtatggaacatctaagtagaaaagtcactagacatgttgatacacttttattggttagtgattgctcaagacgtagcatacaagctgttgctagaataagagatttagctgaggaactaaagttaagtgttggaagaatacttttgattgtaaataaagttccaaatggggttatgaatgatggtgttaaagaagaaattgaaaagcataacctagagctaatcggtgttgtacctatggatgaattgatatatgaatatgattctacaggtattcctttagttaatttacctgaagattcaaaatctaaagtggctatgaaagaaatttttgctaaattagaattaaaataggcttaagggggaaaaaaatatggcatttaaaatgtctactcaaaaatattctggaaaaatatcagaagttgaagtaggaataggggaaaaagcaattaaattaggtggggaaaatgtattacctttttatagttttgatggagaagtaggtaattctccaaaaataggtatacaaatatcagacgtttatcctgaaagctggactgattcatataaggaattatacaaagatgtagctaattgtccagtagagtgggctaaatatgttgaagctaatacacaagcagattttatttgtttaaaatttgatggttctgacccaaatggattagataagtcagttgatgaatgtgctgatgtagctaaggcagtaattgaagcaataaaattacctttagttgtagctggttcaggaaatcatgaaaaagatggtaaattatttgaaaaattagctcaaacattggatggacataactgcttatttatgtcagcagtagaagataactacaaaggagtaggagcatcagctggtatggcttatgcacataaagtaggagctgaatcttctgttgatataaacctagctaaacaattaaacgtattgttaactcaactaggcgttaaaggtgaaaatatagttatgaatgttggatgttcagcagttggttatggatatgagtacgttgcatctactatggatagaattagacttgcagcatttggtcaaaatgataagacattacaaatgcctatcataacaccagtagcttttgaagtaggtcatgttaaagaagctatagctccaatagaagatgagccagattggggttgtccagaagaaagaactatagcaatggaagtttcaactgcagcaagtgttttagtaggtggttcaaacgcagttatacttcgtcatccaaaatcaatagaaactataaaagaattggttaacgcattagcttaattaaattgttaaggttagggggaaaaaataatggcattaaaagctttagatatatttaaattaacaccaaagaaaaactgtaaggattgtggattcccaacttgtatggctttctctatgaaggttgcttcaggagctgtagaagtaggtaaatgcccacatatgtctgatgacgctatagcaaaattatcagaggctactgcacctttaatgaaagctttaaaagttggtgctggtgcatctgagtatgaactaggtggagaaacagtattatttagacatgaaaaaacattagtaagtagaaatagatatgcagtttcattctgtacttgtatgagtgatgaagcagtagatgctaaaatagctaacatgaaaaaagttgactatgtaagaattggtgaacaaatgaaagttgaaatggctgttttagagtattgtggagataaagatgcgtatttaaaattaatagataaaataaaaggcagtggattagaagtagcttatattttagcttgtgatgatgcacaagtagttaaagaagctgttgaagtattaaaagatgctagaccaatggtatatggagcaactaaagagaactacaaagatatgatagaagtagttaaaggagcaagtttaccattaggtgtaaaagctggtagcttagaagaattatatgaaacagttgaattaattcaagccgctggatataaagaattagtattagatgtaacaggagaaaacataaaagatacttacactaatgctatacaagttagaagaacagctttaaaagagcaagatagaacatttggatatccttcaatagtatttgcaaatagattatctaattcaaaccctatgatggaagttgctttatcatcaatattcactataaaatacggttctataatagtaatagatgatattagttatgctaaggcattaccattatttgcactaagacaaaacatatacactgacccacaaagaccaatgagagttgaaccaaagatttatccaatcaacaacccagatgaaaattctccagtattagttactgttgactttgcattaacttacttcatagttgctggtgatatagaaagatcaaaagttccagtatggttagtaataccagatgcaggtggatattcagttcttacatcttgggctgctggtaaatttggtggaaactcaatctctgctttcattaaagaaagtaaggtagaagaagtaactaattgtaaagaccttatcattccaggaaaagttgcagtacttaaaggtgatatagaagataacttaccaggatggaatgtagttataggaccagaggaatctatggaattacctaagttcttaaaaggataccaagaaaaagcatgccaaacaaactaataaaatattaactaactattaatattaaatttaaagggggacattataaatggaaaaatttatgattataggtgagagaatacattgtatatcaccttcaataagaaaagcattagcagaaagagacccagctccaatcttaaaaagagcaaaagagcaattagaagcaggagcacactatatagattttaatataggacctgccgaaagagatggcgaagaaataatgacatggggaatcaaattacttcaatctgagttcaacaatgttcctatagcattagatacagctaataaaaaagctatcgaagctggacttaaagtttatgatagaactaatgcaaaaccaataataaactctgctgatgctggctcaagatttgatttaatagatatagcagctgaatacgaagcaatggttataggtttatgtgcaaaagaaggtatcccaagagataatgatgagcgtatggcttactgccaagaaatattagaaaaaggcttaatgttaggaatggagccaactgatatactatttgacccattatgcttagttataaaaggtatgcaagaaaaacaagtagaagttttagaagctataaaaatgatgactgagatgggacttttaactacaggaggattatctaacgtatctaatggatgtcctaagcatgttagacctgttttagatagtgcattcttagcaatggcaatggctaatggatttagttcagctataatgaatccatgtgacccagaattaatgaaaactgtaaaatcttgtgacataatcaacggggcatctttatatgcagactctttcttagagttaaatgaaggtggatttgctttctagggtttttagggtatagttaataaaaaataggtgtaaatattaaagggggaaatagaatgaatctatataatataatctttacagggtcagaacaagctttaggtgcggctcaagctatgttagctgaagctatagaaaagaatggaaaagagcataaagttgctttccctgatacagcatattcattaccttgtatatatgctgcaacaggacaaaagatgaacactttaggggacttagaaggtgctttagaagtagtaaaatctttaataaatagaactcatttactagaacatgcttttaatgctggtttagctacggctttagctgcagaagtaattgaagcattaaaatattcaactatggatgctccatatagtgagccatgtgcaggtcatataactgaccctataatcagatcacttggtgtaccattagttacaggagatatacctggtgttgcagttgttcttggtgagtgtccagatgcagaatcagcagcaaaagttataaaagattaccaatctaaaggtttactaactttcttagttggtaaagttatagaccaagctatagaagctggagtaaaaatgggtcttgagctaagagttatacctctaggatatgatgtaacttctgttatacacgttgtatctgttgcagtaagagcagcattaatattcggtggattaactcctggtgatttaaacggattattagagtacacagctaatagagttcctgcatttgttaatgcatttggaccattaagtgaattagttgtatctgcaggtgctggagcaatagctttaggattcccagttataactgaccaaacagttcttgaagttccaatgaacctattaactcaaaaagattacgataagatagtagctacttcattagaagctagaggaataaaaataaaagttactgaaatacctatcccagtttcatttgcagcagcatttgaaggtgagagaattagaaagagcgatatgtttgctgagtttggtggaaacagaactgaagcttgggagcttgttgttaagaaagaagcaacagaagttgaagaccataagatagaaataataggaccaaatatagatgaagttgatgcagatggtgtattaagattaccgcttgctgtaatagttaaaatagctggtaaaaatatgcaagaagatttcgagccagttcttgaaagacgtttccactacttcttgaactatatagaaggtgtaatgcacgttggacaaagagatatggcttgggtaagaatctctaaagatgcatttgataaaggatttagacttgagcatataggagaagttttatatgctaagatgttagatgaatttgaatcagtagttgataagtgtgaaataactataattacagatgctgaaaaagtgtctgaattaaaaggagaagcaatagctaagtacaatgctagagatgaaagattagcttcattagttgatgaaagtgttgatactttctattcttgtaacttatgtcaatcatttgcaccagctcacgtttgtgttgttactcctgaaagacttggtctttgtggagcagttagctggttagatgctaaggctactaaagaattagacccaacaggtccttgtcaaccaatagaaaaaggcgagtgcttagatgatagaacaggtgtatggaattcagtaaatgaaactgtaaaccaaatatctcaaggtgcagttgaatctgttacattatattctatactagaagacccaatgacttcttgtggatgcttcgaatgtatctgtggtataatgccagaagcaaacggatttgttgtagttaacagagaatttgcaagtgttactccagttggtatgactttcggagaacttgcttctatgacaggtggaggagttcaaactccaggatttatgggacacggaagacatttcatatcttctaaaaaattcgcttatgcagaaggtggaccagaaagaatagtttggatgccaaaagaattaaaagattatgtagctgataaattaaatgctacagttaaagaaatgactggaatagaaaacttctgtgatatggtttgtgatgaaactatagctgacgattctgaaggagtattagctttcttagaagaaaaaggtcatccagcattagctatggaaagtgtaatgtaattgatggaaaatttaaaataatatgatataatattaatatgatttaagtaatttaatcaataatataatattgggggtctatcgaaatgaaattattaccagaattaaaatactctaaagatcatgagtgggtaaaagtaattgatggagatgttgtatatataggtataacagactatgctcaagatcaattaggagaaatattgtttgttgaaacaccagaagtagaagatactgtaactaagggagtagattttggagtagttgagtcttctaaagtagcttctgatttaatatctcctgttaatggtgaggtattggaagttaatgaaaaattagaagatgagccagaatgtataaatgaagacccatatgaaaactggatattaaaagtaaaactagctgatgtggctgaacttgatacgttattaagtgataaagaatacgaggctggattagaataattaaagattaagatattattataattggggaaagtatagtaaaatttgagtgcacgcaaatttagctatactttccttttatcatatatagaacaaattgggagggataacatgataaaagtgagttttacaccaaacaataaagaggtttattgtaatgagggtgatatattactagaggttgcaagaaatgcagatatattcatagatgctccttgtaatggaaacgtgtcttgtgggaagtgtaaagtaaaattattgaatggaaaagttgatacagaaaaaacaagacatataacagatgatgagtgggagcaaggttatatactagcttgttgtacaaaggtaatatcagatatagaaattgaagttccttctaaagtatcatcttctatgcatggtatgaagatagaaggtagtaataaaaaagaggatagggaaatttttgaaagagctaaaaaaataattgaagaacataaccttcaatttaaaacaaatataaaaaagaaatacatagaaatggaagaaccaaatttagatgataatataagtgatgtagatagattggaaagatatgttagaaatagcctaggatataatgaaatagattttagattggatatacttagaaaaatgccaactgtatttagaaagagtgattttaaggttacaataacatatgttcaaaaacaaaagaaacttacaatcataaatatagaacaaggtaataaagaaaattccttatacggagttgcaatagatattggtacaacttcagtagttgtttgtttagtagacctatattcaaaagaggtagtagataaagcatcttctggaaatgcacagataaaatatggagcagatgttataaatagaattatatattcaactaagaaaaatggattagagacacttcataaagctatagttgaggaaactataaatccactattaaaaacaatatatgaaagaaatggaatagataaggaagatgtagttacattagtggctgccgggaatacaactatgacaagtttattcttgggtgtgtatacagacttcttaagacaagaaccttacataccaccatttttaaaatctccaaaacttatgggtgaaaatgttggtctttttgtaaatgacagtgcatatgtgtacttagctccatctgttgcaagttatgtaggaggagatataacagcaggtgtattatcagcagggatatggtcaagtgaagaaaatgttttatttatagatttaggaactaatggagagattgtatttggaaataaagattatatgatgagctgtgcatgttcagcaggacctgcttttgaaggtggagggataagctgtggaatgagggcatcagcaggagcaatagagaaagtaattattgataaagaaactttagagccaacattaaagattattgatgaatgtgcaccagttggtatatgtggttctggtataattgatttaatctgtcaaatgattactaaaggtgtaatagatagaagaggtaaaatatacagggatttagataataagagagttagatttaatgagcatgagataggagagtatgtattagcatttaaagaagaatttgatttagaaaatgatatagtagtcaatgaagttgatatagataatttcatcagagctaaaggagctatatattcaggtgcatacactcttgtagatagtttaggtatggattttagtatattagatagggtttatatagcaggtggtataggaaacaacctagacatagaaaactcaataattatagggttacttcctgacattgatagagaaaaatttacttatatagggaatagttcacttgttggttcttacttagctctcataagtaaagatgcaaaaaataaacttgaagaaataggtaatcaaataacttatgttgaacttagtgtatatccaagttatatggatgaatttatttctgcatgtttcttaccacatacgaatatagagcagttcccaacagcaaagaaattactagaagagtaaaatgtacttaagaaggaataaactatgaataagaatctatctgaaaaaatgaaaatagcatttgatattaaattaaagaattttggaaataaaatagagtttgcttatcctaaccagacactagctcttagtactacaagcaatcaatgtagtttgaaatgtgcccattgcaacggtcactacttaaacaatatggtgccaatagaagaatatgaggaaaaagtacaatcaaggaatataactagctttctattgagtggcggttgtagttatgagggagatgtccctataaatactcatattaataccattaaaaacttaaaagagaaaggatatagattgaatgctcatttaggtcttatggataaagatagcattgtagagttgtgtaagtatttagatatagtttcttttgatttagtgtttgatgatgagacaataagagaagtttataagatgaaaaagagtaaagaagattatattgaagtttataatacaatacaagaacatacagaagtagcaccacatatatgtattggtttaaaaggaggacaaataaagggtgaatatgaaattatagaatacctacagaaaaatcctcctaataagcttacatttatagtccttattccaacaaaagggactgagtatgaaaatgtagaacctcctgagttagaaggggtagcagatattttatgtgaagctagaattaatttaccagatactgaaattaatctaggttgtatgagaccaagaggagtgtatagaaaagagctagaccaattatctataatgtgtggagtcaatagaatagtattaccatcaaggtctgcaaagaataaggctatagaaatgaatatgacaataaatgagtgtaaggagtgttgcgttttatgattagactatcagttgggacagcaatagagcttgggatattaaacaaaaaaagcgatatacctcctaccacagcatatataatgattggagaaaaatgtataaataaatgcagtttttgttctcaatcaatagaaagtagtactagaaaagataaattatcaagagtaatttggccagagttttcaaaagaagaaatattagatgctttaaaagcttataaaggaaaaaatataaagagaatatgtattcaatcaatggcaagtgaagaagcacataactctgttttagactttataaactatataagtggtaagatagacatgccaatttcactatctgcaaaattagaaaatgatgaacagataaagaagtttttttcagtaggagttgataaaataggaatagcaatagatgcatcaaataaagaactatatgaaaaaataaaaggaaataactatgatgaaaagttaaaatttataactgaaatgtcaaaatcatatcccaataaaataagtacacatataatagttggtatgggtgaaagtcatgaagatatatacaatttatatatttatttaaaggaaaatgatgtaacgattagtttatttgcatttactccagttagaggaactaaaatggaaaagataaatcaaccaagcatagaaagttatagaagggtacagttaatgtcttatatgataaataaaggttatccaaaagagtattttaagtttaaaaatggatacttaaatagtataaagcttgacaatgatattttaaaagacataaacaaaggctatccttttgaaataagaggttgtaaggattgtaatagaccatactataatgaaagacccggaagtactatatacaactattcaagacctttaaatcaaagtgagatagatttagcaataagagaaataaatctatagaggatttctaggatatatttatactaaaaatgggggcgtaataatcatgaatcagtggagagttatacataataaatcatatgaaggagcaatgaatatggcaattgacgaagctatatttactgcatataagaaaggacataataagccaactcttagattttatacatgggaaccagcttgtttgagtataggatattttcagaaattggaagatgagatagatttagataagtgtagatgtatgaatatagactatactagaagaattacaggtggaagagctgtattacatgataatgagctaacttatagtataattataggagaagataatcctttaatcgataagagcatcaacctatcttatagatatataagtgaaggtctagttaaaggattgaatctaagtggtatagaaacagataatttaaatagaggcgagagaataagtagggaaaatttatcagctgcatgttttaatgcacatgcatcatatgaagttactattaataataagaaggtaattggaagtgctcaaagcagaaaagatggtgttttattacaacatggttcaataatactggattttgatgtagaaaaattgtttaaattaataaaaactaagacaccagaattgaaagaaagagctatgaaatttacagctaaaaaagcaagtggaatagaaaatgaaattggcagaaaaatagacatagatattctacagaaaaacatagtaaagggattagctgaacaatttaatgttgagtttgtggagggcgatttgactgattatgagaagcaattagttaaagaactatatgaaaaatacaagaatgaagagtataataaaaagcgttaactttaattgactttacataaattaaagtgatatacttaaggtataataatatacaaaaactgaaatcatgaaggtttctttggagtattgaaatacctaagggaatctttttttgatttttaataaaaatcatattaggaggagatttatatgtgtgaatcatcagctttcatttgtaaaagtaataatgagttagaaaaggttatggaaaatgtggttaatatagacccttgtgatggaaagatttatttaacggatttattaggagagcaaaagataatagatgggataattaaagaaataagattgatggaccataagataataatacaagaaaattaattaataggggaatttcatatgataatagcagtgatagatggaatgggtggaggtattggagcccagatagtttcttctttgagagaagagttacctacatatgtagaaatttatgcactagggactaattctatagcaactagttctatgatgaaagctcatgctaataaaggagctacaggggaaaatgctatagtagtatcagctaaaaaagcaaatataatagttgcacctatttctgtaataatacctaattctatgatgggagaagttacttgtaatataagtgaagctattgcagacagtgaggcacttaagatacttttacctattatgccagaaaatgtggagttagttggattagaaggtaaaccattagcactacttgtaaaagattctgtaaaccttataaaaaaagagtttaatataaaataacagggggaataactaatgatttttgataaagagattgtaagatatcatcatggacatcatgaccatgaccactgccacgaacatactcatggagatatatgtcatgaacatccacatgaccatgctcacgaccacgaccatgaacatagtcatgaggaatcatcagagtctaaggatgaaaaaactttaaaaatacttttagtacattggataaatcacaatgaaactcatgaagaaggatttagagagtgggttgaaaaggctagagctattggaaaagaagaaacagcaaagagtattgaaaaggctatagagtatatggaagaagctaataaaatgttgttagaggctaaaaaacatatgtaaatataattaatcgcttatacgtttgatataagcgatttttatattttatgatgtttaattattaaaaattttatctaaggggttatctcaagatggatgtaagcctccctttcattgttgaaatgataaaaatatatctaatttcatgcaaaaaagagtatatcatgaactaaaaagtttattttgagatattttctgtaatatactttaatgagtaaattttattacaagattggattatttaatgttaaataattatatattctttaaatactgcaaaagcttcatcaaacaatttgagttatttgattaattatatattgagtattactatttaaagatagtattaatgttaagttaaaaaataatattaatgttaagttgaaaatagtactaaagataagatacttaaaaggcagtttaaaattactctaatattagatataataaaaattagcatgattaaaaatattattttgaagttaaaaaatttatgcatttatattagattttttctttaaaaaaggagtgaattatttatgaaagatggtcatatacattcaccttattgtcctcatggaagtaaggatgattttgaaaaatatgtacaaagagcaatggatgttggaataacagaaatgacatttacagaacattttccgtatgcaaatggatttagagaccctgctcctgaaaatgatagttgtatgagtattgaagatttaccaaagtattttaatgatgtcaagaagttgaaagaaaagtatgagggtaaaatcaagataaatgttgggtcggaagtggattttatagaaggatacgaagaagggataaaggagaatttaaataaatatggaaaggaattagaagactctcttttatcagtacatataattaaaattgatgatgattattattgtgtagattacagtgtagaggagtttcaaaatttaatcgacaaattaggaagtattgaagctgtttataataagtattatgaaacattgataaaagctgtaaattcagatttaggtatacataaaccaaaaagaataggtcatttaaatttagttagaaagtttaatcaggtatttccatacgattataaaggaaatacaattcttgaagacttaataaagttaattaaagaaaaaggttatgaacttgattataatgtttctggaaatagaaaagagtattgcaaagagccttatatagatggatacttattagagttggtaaaaaaatacgatattccattagttttaggttctgattctcactgtgcagaggaaataaataaatacgatattatttagatatattcacacaaaagactgtagataagtttgtataaaataaatttatgtacagtcttttgtaaatttatatgattgaaaatagtaatagaacttaaataaaataacaataagttctaagtaaaataacaatagaatctaagtaaaataataataaaattcaatagaataataggacttagaattaatctatcttatttatataaacattcttatataagattgtagataagattgtatttacacaaatctatagaccttctctattatattgacttagtaattataaatactattttgcgtttaaagttattatttcataagtttatcgttttccattattatagggtcaggcaattcaatttcaccttctgacatcttcaatctattaaacatataattttttacaccttttttatttttaaatttagtaacttgataaggtgatgtaacaccatatttttctaaaaatagaatgccatttttagttttaatacatatgcctgtatgacctataaatacgtttttagtttctggataacgaagaaatccatttataatagatatatttttattatttttaaaagatatttttctttttttccattcattttttatttgttctgcaattttgattgtatcatctgtatctttagctggtattgcagaaaagaagttgataaatttttctacatctttggtgctaaatttagcatctttattattcattatagtgtctaagtcgacattcaaatcaatagagtctccagtaaatttcttatttgaatttataaaatctttaaaaagtctaaaagcagttattctacaatttacatccatataatcagggaattttttcacccaattatcttgcaatttttctaggttatatggaacttgttttgcattgattgaagaatatccagatttagatatatttatattattttgaagtattttaacttgcaatttattataattgttgactgctttaataaatgtatctatgtctttttcattaattttattttcttttaggatttcctttacactattttgagtttttttatctatcatattagaatatatcaatttattattattatatttaatatttgaatatgcaaatatcgtaagtatacttgatagtactaagacaacagacaatatcattattattaatctttttttcatatttagttctcctttttaaatttattgtgtcgacatatttatagtatatagtacctttaaatttaccttcaatatgtttttaattacaaaactgttgtaaaaaatataactttatttaaaacttttttttaatatataaatatatatactaatagggggtacttatttttagaatattcagtaaaataattttgatatactctatatattttgtatgttaaaagtaaataaattattgttaaagaatgtaaagacttttaaattttttatcacaggattttaagtaaataagaaggattggagtaattaaaaatttttattttgcaaaaataagtatttatttatatggataaatttgattttaaatctatcaatatagataaaatcttattatttaacttcaactattccttaaaaaagcaacttttaaggaatagttgaaacaaaaagtttggttacataatagtaattttagttacaagaatgaaactgtaaaacttaggattttctttatataatttcattgagaacatttaatttaggaggtaaggtatgaaagtaaaaaaatttaaaagtggtatagtaatggcattaacagtaatggcaattggagcatcattgacaaatgtatcagctatggaattaaacaagagtaaagagtttgaaactaaatacaatgaaatgaagagggattttcaagaggattatggaaaagaagacaaatttaatataacattggatgatgaatttacaaaagaagaagtaaatggagctaaagggattataaagacaactaataaaatgaataatgaggttgtagtattaaattattttgatgaaatgaaatctgggattgaatttgagttgaaggcaaaagcagaaaaaaatgcaattttgagagatgaatttcaacaaggttatggaaaggaagataaattcaaagttgtgttagatgatgaatttacaaaagaagaggtaaatggagctaagggcattataaagactacagataaagagacaggtgaggttatcgtatataattactttgatgagcttgaaaaataatgcttaaagattactttgattgaatgaaaaggtaattgtgttgagaatattaaatgactgaataaaaacagttgtatcaaaaacaaacaataatagaatgtaagaatgattgtgtcgaaaatattaaatgactgaataaaaaatagttgcgtcaaaaacaaacaataatagaatgtaagaatgattgtatcaagaatataaaatgattcaacaaaaaacgattgtgttaaaaacaaacaacaatagaatgtaagaatgattgtatcaagaatataaaatgactgaataaaaacgattgcgtcaaaaataaacaataatagaatgtaagaatgattgtatcaagaatataaaatgatttaacaaaaaacgattaaatagaatgatttgtgtataaaatgatttaacaaaaacaataaacaataatagaatgtaagaatgattgtatcaagaatataaaatgatttaacaaaaaacgattgtgttaaaaacaaacaataatagaatgtaagaatgattgtatcaagaatataaaatgactgaataaaaaacgattgcgtcaaaaataaaaaacaattaaatgtaagaataattatgtcaaaaatataaaataaattaaaagaaaaagattatactgaaggaaaaagatttgaaataggggtgaactttacatattatagttcacccttatacaaaaatataaaatataatttattataggaaaatttaaaaaaatcagtctatttaatttatactgatgtattgtaggattttacaaacaaactgttatataactttttttatctccaattttgattttaagatatctaagaatttataacaatcttctggatatatttctcccatatttgcaacttggaatatgttagcatctaggaatttgccttttcctggatagacaacatagccactttccctttctaggcctaatataaactcatttacattgatttctttaggtagaaatacagatgttactgtattagacatatacttatctggaagtaaaaatgttagccccaattcttccatgccattccttaaaatagcagaacattctttgtatctttctattttactgtcatcttccaaaaactcagttaaagcttcattaagggcaaatattaaagtaacattaggtgtatttggtgtttgagaagatgatttagcaactttatagtgtttataaagattaagatatacattcttacattgattttctttaatattttgtaaaatactctctttagcacaaaggtatgcagaacctggaaatgctccaagagctttaccaccaacacctgttattatatctatattaaactcttctacatcaatatattcacctgctgaggcacttattgcatctacaaaaaatattttgttatacttcttagcaagttttcctagttcagggactggatttatcattcctgaactagtttcatggaacaccatagcaattacttttatatcagaattttcaattatatatttttctaaaatgtccaggtctgggtattctgcccattcaaaattaggcttatatgtttttacattataagtaaataatatttcttctagcctttctccaaaaacaccattactaactagcagaactgcatcttctttgtcaaagatagaagatagtacacattcatttacagatgttccagagccagatacaattaatgagtagtaattagaagttgcattatatagtttattgattttttgttgtgtatctttgaataaatccataaactcgtttcctctatggcatatatcatagtgaagaagtgaatttctgactttatctgtaaccattactggtccaggactgaatagatatgtttttttcattgtaaagcctccttaaaaagttaaatttaaattttcgaatgactgactatgtgtaaatattaaaatattgtgtgttattttaactagattatagaataaaataatgaatattgcaataatatttcaataaaaatacttttttaatcaccataattaaaaataacaaaaaatattgtaatgaatattgcataaatccacatgatgatataaaatataaataacttgaatagattatatattcaaaaaataaaaaagaatttattaattctgaaaataaagggggacattttaagtgaaatatgtattagcaattgaccaaggaacaacaggaacaagagcagtattgataaacgaaaaatcagagtttgtttttagcgattatatggaacatactcaaatatatccacaatctggatatgttgaacatgaccctatagaaatttggaataatacaaaaactgtgagtaataatgtattacaacaggcttttgaaagtggaatcaatgaaagtgatataaaaggaattggtatagataatcaaggtgaaacagtaatgttatgggataaaaatacaggtaaaccactttacaatgctatcgtatggcagtgtaggagaacttatgattatgtggaaaatttaaagaatataccaggtttagaaaataagataatagataagactgggttaattatagacccatatttctcaggtacaaaaattaaatgggtaatagataatgtaaaaggtgtaaaagaaaaaattaaaaatggagaagtacttgcaggaacattggatagttggttaatatggaaaatgacaggaggaaaatcttttttaactgatgtatctacagcagcaagaacaatgctttttaatataagagatatggattgggatagagagttgcttgacattataggagtgcctagaagtattttagcagatataatgcctactagtggtgattttggaactacagataaggaggcattttgtggggtttctataaaaattactgcttcaatggtagaccaaccagcagctttatttggcaatggatgttttgaaccaggaatggttaaaaatacttatggtacaggatgtttcttatatatgaatataggtgaggagttaaatatagcaggtaatggtattttgacaacagttgcttggaagataggagataaagttacatatgcttatgatggtggagtgtatatagcaggtgctgcaatacaatggcttagagatggaattggagttataaaaaattattcagaaactgatgacatggcaaattccatatcaagtactggaggggtatattttgtaccagcatttgcaggtatagcagcaccttattgggaccaatatgctagaggcacaatggttgggataacaggaagtactaaaaaagaacatatagtaagggctactcttgagtctgttgcacttcaagtcaaggatgttgttgattccatgaatttggcttcagggaaagaaataaaaatgttgagagtagatggtggaattactaaaaataactttacaatgcaatttcaatctgacatattagatataccaattgaaattgcagaaaatcctgaaacgacagtacttggtgtagggtatatggcagggctttcctgtggtgtttggaacagtattgatgaaattagaagtgaatttacaataagcaaaaaatatattccaaatatgactaagcaaaaaagagaagaaatattacttggatggaatcaagcagtaaaaagagctatgaattgggaaaacgataccaaaaaggtgtgtgctaattaagttacaatagagtattttacatgtataggaggaattaaaaatgccctttgataaaattatattatacataatggctgtgggagtgcttttaggagcgttagatagaataattggaaataaatttggacttggagagcagtttgaagaagggtttaattcaatgggtccattggctttaggaatggttggtatagtttgtttagctccagtaatttcagatgtactaggtcctataataataccaatattcaatctctgtggagctgacccatctatgtttgcaactattttagcgaatgatatgggagggtatccattggctatggaacttgcacacaataaagaggcaggaatgcttgcaggattagtcgtgtcatccatgcttggatgtacattagtattttcaattccagtaggactaggtcttatagaatatgaagacagaccattctttgcaaaagggttactgataggcttgataacaataccttttggaggtattataggaggattaatagcaggatttaacttatcaatggtaattataaatatgataccagtgataatattggcagtaatattggcagtaggtttaaaatttaattctacacttatgataaatgggtcattagtttttggaaaatttatatctatattgataacgataggtttgggagcagcagcatttcaagaaataacaggtatagtacttataaaaggcatgacacctataagagaaggtattcaagtaattggaagtattgcaatagtgttattaggtacttttccaatattacatttattagttaaagttcttaataaaccacttacaatagtgggtggaaaattaggtatggatgccactagtgcagcaggattagtttttactttagccaatagtattccagtatataaaatgatgaaagatatgagtccaaaggggaaagtagtaaatactgcttggctggtttgtgctacagcagctttgggggaccatttaggatttacagcaggagtagttccagagatgattacacctgttgtaattggaaaattggttggaggagtattggcaattgcacttgctatacttatgacaaaagatttaactttggaagaagaacaaagtattaaaatgaagaaagatgcagtgtagaataaacaatacttaagtcaaatttaagttattttaaagtaggagtttaaataactaaaaataaattaaaaagacagacaattaaaaaataatcgaataaccaaaactgataaattaaataaaatggcaatcaaataactaaaaatgataagctaactgaaagtagttacataattaaaatataaagtatagtttagacataagtggagctaaataaataattatttggctccttaattttaatttattacatcaaggaactaaaaatcaatcatacaagctaattatcagctatgactaaaggtattcctttttgagaaaactctattattatattatggtctatactagcagaggtaataatagtatctatgtgttctataggagctactgatgcaaatgaatttataccaaacttaggaggttcgacaactactatagattttctagacctttcaatcattttttttctaaccagtgcttcttctaagtgatagtcagagattccattttcaagagtgatacctccagcacctaaaatagctttatcaacattaaattgttcaatagctgagagtgtaagtggaccagaaaaagaaccttcagtttctctaagatagccaccaagcacatatacttttatattagtattcataagttcatttgcaactaaaattgagttggttattacagttagattctttttatctttcaaattttttgaaacttcaagtacagtagttccagtatccataaaaatagtatcatttgtatttataaactcactacatttaatagcaatctgttttttatcgtttgagtttattttttttcttttaacatagttaagttctacgctacttgctataactggtatagcaccaccataaactctttttaaaagaccgatactttccatatgggctaaatctcttcgtgcagtttctattgatatatcaaacatttgaactatgtcatttattttaattatattatctgatttgagaatacttaaaatcttctcgtatctttcctgtggtaacataaaatatcctccttggactagtattattttagttttggcataacttacaattaagtcagagtttaggtatatttgttaatgtatgtatatttatcaaataatattataagtgttatgcaagataattttaccatatttaaaacttacatttaagcaaaaaagtaaaaatagatgtttaataattcaaaataactcaaattttataaaacaattgactaaaatatgattttattatataatttactagtatagagatatggagaagtactcaagtggctcaagaggatcccctgctaagggattaggctgggtaaccggtgcgagggttcgaatccctccttctccgccaattgttaaaggctatttttattaaagatagtctttttataatgtcataaatgattagatatgtataattaaagaaaggagggaatagatgacaactttaatttttttcatagtggggatagcatctttggtagttgcttttgttattgatgggggacatattggagtattatttgtattttcatcagcacttgttgtgtttggtggaactataggcgctgttggagcttcgactccattccctgtgtttaaaaagtctataaagataatgttattagcttttaaaaataaaaagcctaataacatagaaaatataatctatttcaaagaaattgcaacaaaggctaggaaagaggggcttcttagtgttgacaaagaaataagtgagaatgatgaattagacccttttattagaaaagggcttgaacttatggtagatggggtggatgcagttactataagaaatatattggaatcacagatacagataacatcaaaacgacataaagaaggaatagcaatttttgattcagcaggtggatatgcacctacactggggataataggtacagttatgggattagtacatattttaggtaatctttcaagtaatccagatgcattaggacctcaaatttctgttgcatttttggctactttgtatggtgttggttctgccaatttaatatggttaccaatagcatcaaaacttaaggctataaatcaacaggaaataagtgaaagacttttggtgatagaagcaatattatccatacttgagggtgataattctaatttaatgacagaaaaattaaaaatatttttaaattcaaaagaactaattgaacttgaagaaattggtggtagagctgaataatataaaaggatggaatgtttatgttgtatgatgaagatgaaaaagaagaaaacaatgagcgatggcttttaacttattcagacctcataacattacttatgattttctttgtaataatgtattctatgagtaatgttgatgcggagaaatataaacaattatctcaatctctaaattctgcttttggtggttcttctggagttattgaaggtggtaatagcaaaatagaaccagtagttgaaccaggaagtaatgatttagatagtttacaaaatgctaagtttaaaaaagttggtgaagaaatccagaagtatttaaatgaaaatggtatggctaattcagtatcattaagagttcaagatagaggattagtaataagccttaaagatacaatactatttgatacaggaaaagcagttgtaaaggataattctagagataagattattcaaataggtaagatgttaaatgaaatgaatagttacatgagagtagaaggtcatacagacaatatgtctataaaaaattcagagtttaagtcaaattgggatttatcagttatgagagcaaccaatgttgttcaacttcttattgacaatgcaggtatagcaccagataaattatctgctgtaggatatggtgagtttagaccaatagcagaaaattcatctgaagaaggtaggtcaaaaaatagaagagttgatatagttttagttgatagtaaatatgataatgtagaaaatgtttcaaaggataaatagttaaattagctgtctcaatacagaattaattctaaaggagatggcttttttatgcgaaaattaaaaatagatacatagtaagttacctttttgtaggaatatatggtatcttaaatatataatatttaaataatatataagctcaattaaaaaaattttatagaggatgggaaataaatggggaataaaaataaaaatacgaaatataaagataaaacaagagaaagatataataaaaaagttgagaatttaaataaagaaaaattaaataaagataataaacagtctaagaaggtagataagattgatgatattattaataaatctagtattgtattatgtgtacttctagtggtgttttcattactttacttatttaaattggttcaacttaatataataatgatacttttagtaattacagtagctattcaacaaggattggtgtcatttggtgcatttagaaataaaaattatgtaaaagctttattttctatatttgtaatagtatgtttcttaattgcttttaaatatgttgtaaatcctgtttaaatatatcaataaacgttctataattaatataaatagtgaagttacagttttaatgctattataaattttataatttgaaggagtagattttatgaataggtgtaagtttgcaaaattaattatcacatcaatgattgttttattacttacaggatgtagtttaaaaaaggaagataattataagttagacccagaaaatccgacatcaatacaaatttggcattattataatggacagcaaaaaatggcttttgataagcttgttaaggaatttaatgacactataggtgctgaaaaaggaattattgttgaagcgtttagtcaaggtaatgtagttgatttatcagagaaagttttagattctgcaaataaaaaagttggctctgaagatgtgccaaatatatttgcagcatactcagatactgcatatgaaatggataaattagggttactagtagatatggataagtacataagtaaagaagaattaaatgaatacatagacgaatatgtagaagaaggcagaataaattctaaggatgagtttaaacttttcccaattgcaaaatcaactgaaattttgatgttaaataaaactgattgggataaatttgcaaaagctacaaattcaaatataaatgatataaaaacaattgaaggattagtagagacatcaaaaaaatattatgaatggacagatagtttaacgaaagagcctaatgatggtaaagcattttttgggagagatgctttagcaaattatattattataggaagtaaacaactaggagtagaaattttttctgttaaagatggtaaagttacactaaatattgaagaaaaagttatgaaaaagctatgggataatttctatgtaccatatataaatggatattttgcttcttatggtaagtttcgttctgatgatgcaaaaacaggtgatatattagctcttgtaggctctagttcaggagcagcatactttccagatagagtaatgctaaatgataatgagagttataatattgaaacatctgtttttcaagcaccacgttttaaaggagaaggaaaatatgctgtacaacaaggtgcaggaatggctgtaacaaaatctactaaagaagaagaatatgcatcagtagaatttttaaaatggtttacagataaagagcctaatataaaattctctattgcttctggatatttaccagtaaagaaaaaaacgaatgatttgaatgttataaaagaagttatgaagaaagataatttgagtttatctgataaagttgaaggttcaatagcctcatctattgaacaaattaacagttgtaatttatacactaataaagcatttgatggtggaactaaagctagacaaatacttgaatattcaatgcttgataaagctaaagaagattcaaataaaataaatgaattggtaaaaagtggaacttctaagaaggatgcggtagcacaatttaataatgataagaattttgaaacttggtttgaaagttttaaggctgagcttgaaaatgctataaaaaaatagatgaattggcagttagtgtgtagacaagcacaaaggtataggtggaataagtatggaaaacaatctaagaaaaaacaattcaataatgaaaaagatgatatttcccctaattattgttatgctaattcaaacaagtttattttgtgccacaattttatggggaggaactattaagaaattaaatgataattcgtttgacatcttaaatgaaagagtaattaatcgtaaaaattatatacaaaatgaaatgttacaaagatggtcaaatacaagtgaaacggaagctacaattaattcctctgtaaaaaaaatattaaatgaaaaaaatgccttaattgaggatgtaggcaacaatgaagaaattaacaaagatattataaaaagcatatcaaatgatttaatatatcttttgagaaaaaactctgttacaggagcttttataattctaaatgacaaaaatattaacgataagccaatagatagtaaaggtgaaataagtaggactggattgtatataagggatttagaccctaagtttaatccaaatgataattctgatttgttaattgagagaggttcatcagatatagcaagaagttttggaatatctatggacagttattgggaacctaaattttcatttaaaagtgaaaatgagcaagagggagatgattttttttataaaccatttagagctgcaattgataatccaaacgtatcaagttctaatttgggatactggggaagtaagtttttattgacaaatgcaggtgataggcttatgacatatacagttccccttatttatgaagatggaactgtatatggagtacttggaatagatttaagtgtaaattatttaagagaattacttccatactcagagataaatggaaataaaaaaggtaattatattttaggtgtagatagaaataatgatatggcctttgaaaatgtaatttcaaatggatactcattaaaagaaaaattttgggatggtttacattctaatttagagcagaaggaatcgtataaaaatatatataagattaaaaataaagataatgaatgtggtaatggcaacatttatgctagtgtacaatacttagatttatataactccaatactccatttgaaaatgaacgttgggctcttttgggtattattgaagaaaaaagtcttttgtcattttcaaaaaggatagagaaattagttataatatctatagcaatttctttattaataggtctaataggtatttacattgcatcaagattatttacaaaaccaattgttcttttagccaacaaagttagaaacagtaatccatcaaaaccagtaaatcttgataagataaatatatctgaaatagatgaattatcttcagctatagagttactcagtgcaaatgttgcagattcttcatcaaaattatcacagattattgaaatggtagatatgccaatcggggcttttgagttatacaaaaacgcagagaatgttttttgtacaaaagataaaaaacttaagtggataagaatgaatatctttgaagatgagctaaaggttcttggtgttgttgttgatgtcacaaaagaatttattgagaaaaggaagatagaatatgaaagagattttgatattttaacgaatcttttaaataggagagcttttcattcacagatacaagaaaaatttaagaataaagatgaacttaagatagcagcatttattatgtgggatttagataatctaaaatatattaatgatacatatggacatgatgctggtgatgaatatattaggtgtgctgcagacatacttaagaagtttatatcatggaatggtatagtatctagactttcaggtgatgagttttatgtatttatatatggatatgaaagtaaagatagtataagagatattattaattctgttaagaaacagatgaataataccttattaaaacttcatgatggaacagaatttaaaataagggcatcagcaggaatttcctggtaccctgatgattcaaccaactatgatgaattaatgagatacgcagattttgctatgtatcaaattaaaaatacaatcaagggggaagttagtgaatttgatattaatatatataataaggattcattcttattgagtaatagagaagaattaaacaagttaattgatggtcaattagttgagtatgcatttcagcctattgtagattgtaaaggtaaagtatttgcatatgaggcacttatgagacctaaaataaaaacttttagttcaccaatagatgtaattagattagctcgttcacagtctaaattatatcaaattgagcgtattacatggtttaaagcacttaaatcatttaaaaaatacaaagaaaaatttggcgattgcaaactgttcttaaattctattcctaataataatttatcaaaagtagattttgaggaaattgaagatttatatggtgaatatttaaatagagtagtattagaaataacagagaatgataagattaatgaagattttattgagaaaaagaaagcatatatagaccattggaatatagaaattgctttagatgactttgggacaggttacaacggagatgctgtactattatatataatgccagactatgtaaagattgatatgtctattgtaagaggtattgataaagatgaaaacagacagaaaatattaaaaaatcttatctcatattctaacgaaagaaatattaaagtgatatcagaaggtgtagaaacaaaaggtgaaatggaaacactgattaatcttggagtagattatatgcagggttactatattagtaaaccatcatttatacctgaagatataagtgacaaaattaaaaaagagctcaagatatgtcatgaaaataggaatgatgtggtttaatagaggaaaaattaaatttatttttatgaacttttagtttataattaaaaagaaaataatataattataaattaaggtggtggagctaataatcacaacaaacatagatataagaaagttaaatgaaaatcaattagaagcagttgaacatatagatgggccttgcatgatacttgcagggcctggttcaggtaagaccagagtaattacatatagaatagccaatatggttgtaaacaaaaatatagcaccaacaagaatcttggcaataagttttaccaaggcatcttcaatagaaatgaaaaatagagctttgaatttaagtgatgatataagacttaataaggtaacctatggtacttttcactctgtattttttaaaattctaagatactttgaaagatacaatttagacagtatatttgatgaaaagtcaaagcgaatgacaatcaaggcaatcctaaaaagtttaaatatagagaatgctgatgatgatgagaatataggacaagttataaatgaaatctcctatgtaaaaaatgaacttatggataaaaatgaatttaattcagaagtattaacaaaagatgagtttttaaaagtatacaacttatacgaagaacaaaaatctaaagttaacaaaatagattttgatgatatgcttataagaacttattatttacttttgaacaataagtctgcactagaaatggttagaaatgtgtataaatatatattgatagatgaatttcaagatataaataaagtacagtttgaagttttaaagttaatttgtagcccattaaacaatatatttgcagttggagatgaagaccaaagtatatatggatttagaggtgctagaccagattttttgcttgaatttgaacaatactttaataatactaaaaaaataatattagatataaattataggtctaaaagtgagatagtgtatactgcaaatagacttatcgacaaaaataaaaatagatatgaaaaagtcattaagtgtagtcagggggatggaggaagtgttacctacatttctccacatgattcagaggaagaagccttatatattgccaaggaaataattgacgaaatacaaaaagattatgtagagtattcagattttgcagtaatttatagaacaaatatacagtcaagagcattagtagatgtatttatggatatgaggattccatttgtagtaaaagactcagtaattacaatatatgaccattgggcaagtcaagatatactagcttatttaagaataggtattaatccaaaatcaaataaagattggttgagaattataaacaagccttttagatatatatccaaagacagtataaatatggttaaggatgaaaaagactttataacagcattaataaataagtgtaatcttcatcctaaacaagttaaaacaataaatgatttggaaatagatttaagttatttaaatactttaaatcctaaaaatgcaatatcttatattagaactagtcttgattatgatagatacgttttagattattgtagcaacagaaagataaaaactaatggacttgtagagatattaaatgaacttgagagttcagcaactaattttaatactgttacagagtttttagagcatattgatagagtaaagactgagttaacggaaaataacaagaataagcagactgagggtgtcatatttacaactatgcatagtgcaaaaggattagaatttagaaatgtttatattataggtgtaaatgaaggaacaatacctcatgaaaaatcatatgatatttgtaaggaagagaaaaaagaagaacaattagaagaagaaagaagacttatgtatgttgctattacaagagctgaagaaaagttatgtataagctctactttaaataagtatggtaagaaagttgataaatcattatttattaatgatataaaatctccaacgaaaaaagaaattgacagtattggtgtaggggataaggtataccataaaaaatttcatgaaggagaaataattaaaaaagatggaattatgtttacaataaagtttaaagatagagagcgaatcttggatttgaaaacttgtttattgaagaatataatttatactatttaatttagaatctaaatttagatagaaatataatgtattatttattatgtgcaagacaaatagatatgtgtaaaatgtattatttaacttattagaaaaagaaataaggatttaatatattatttatagttgtttagaaaaagcaacaatgtggaaaatattatttagtattattaaagaaaagcaacaatgtgaaagatattatttagtgtaatttaagaaaaagcaacaatgtgaaagatattatttagtattattaaagaaagagcaacagtgtgaaagatactatttagtattattaaagaaaaagcaacagtgtgaaagatattatttagtgtaatttaagaaaagcaacaatgtgaaagatattatttagtattgtttaagaaaaagcaacaatgtgaaagatattatttagtattatttaagaaatagctaaaaatatgaaatatactatttataattacaaaaataatatcaataaatataaacagtagtatttagataatttacaagtaaaaattattaaaaaaataaaaaacttattgacaaaaatattataaggaagtacaattgtattaacaatttaaggaaacaaatccaatgatagagaaagtagcatatatggatttacagcgagttaggggttggtgtaagcctagcaatgaagtctatgtgaagagagctctggaggagattatcagaaactttagtatgataattggtttacccgccttaagggattgagaggataagtacttacttatcaaaaagagtggtaacgcggatataattcgtctcttagctgtaaagctaagggacttttttgatttaaaaataaaaatatccatacagcttaaatgctaacagtcacaaattttgaaagtaatataagtatttatcaataagagtggtaacgcggtaaagtcgtctcttagtcattaaagactgagagactttttttgtaactcgaaacatttaagtattaaaatctgagggaaattataattaaaagagaggggtagttaaaatgaaagtatttaaaaaattattaagtttaggattagtattaggattgacattatcgctagtaggatgtagtggtggaggagaaaaaacaaagttagaacaaataaaagacaatggaaaattagttgttggtactagtgcagaatttcctccatttgaatttcataaggtagtagatggaaaagattcaataaaaggattcgatataatgttggctgaagaatttgcaaaagagcttggtgtaaaggttgaaattaaggatatgtcatttgatggattaataggtgctttaaatgcagaccaagttgatattgttcttgcaggtatgtctccaacaccagagagagaaaagagtgttgatttttcagaattatattatttaagtagaaatgcagttatagttaaagatgcagatatagacaaagtaaaaactgaagatgatttaaagaaacttagagttggagttcaagcaggaagtatccaagaagaatatgtagttaacactttaaaaatgacaactacaaaatctttaaaagcaatacctgatttaattacagaattaaaaaatggaaacatagatgcagttgttactaatgaagcagtttctttaataaatgttaaaaaatatgatggaataaaaatggcaaatactgaagttggtaaagatgtaacagaaggtatggcagcagcaatcaaaaaatctgacaataacaaagattttatagaattattaaacaaaaagataaaagaattacaagatggtaagaagatagaagaatttttaaatgaagcatctactgaagctgcttcaaattagtaagaaagttatgtgggagatgaaattatgagtttagattttagttttttaagtagatttgggacttcttttttggaaggaacaggtgtgacagtatcaatttctcttgtggcattatgctttggatttataataggtataattatctgtatggcaaaaatatcaaagagcaaagtattaagagcaatatcatcaatctatattgaggttttaagagggacaccattattagtacagatatatatagtatggtttggtttacctcaattaggaataagattccctatgttgtttggtataccaagtgaatttatagctagtgcatttgcattatcagtaaactctggtgcatacgtggcagagatacttagatcaggtatacaatcagttgataatggacaaatggaagcaagtagatcattaggattaaattattggtcaactatgagatatataataatacctcaagctataaaaaatatattaccttcattagcaaatgagtttattacacttgtaaaagaatcttcaataatatctgtaataggagttgttgagataatgcgtactgctgatatagtaaaaaatgcagcatttagagcattagagccattaatagtagcagcagcaatttactttgttataacatttactctatcaagattagttggattattagaaaagaaactatctgtgtctaactagatgagagcatgtttagcatttagggaaaacatagaatagtaaaaaggaaagtgataatatgattacaataaaaaatttaagtaaatcttttggagatttaaatgtattaaaaaatatagacttagaaatcgctaaaggcgaaataatggttatagtaggtccaagtggttctggtaaaagtacacttcttagatgtatgaatttactagaaatacctacaggtggagaaataatatttgaaggaaaaaatttggtcgataaaaaaactaatattgatgaggttagacaaaatataggtatggtgtttcaaaactttaatttattcccacataagactattttagataatataacattagcaccaattaaattaaaaaagatgactaaggaagaagcagaaaaaaaagcagaaattttgttgagtagagttggtcttttagataaaaaagattcatatccatcacaattatctggaggacaaaagcaaagaatagcaatagctagagcacttgctatggaaccagatatgatgttgtttgatgagccaacatctgctcttgacccagaaatggtaaacgaagttttggatgttataaaagaacttgctaaagaaggtatgacaatggcaattgtaactcatgagatgggatttgctaaggaagttgcagatagagttatttttatagatggaggaagtatacttgaagataatactccagaagaagttttcggaaatccaaaacatgaaagaacaaaagcatttttagcaaaagtgctataatatataaaaaggatgttattgatattagaaattcaatacatccttttttagtgatggttaatattaattttaaaattaaagttatattaatattaactttatttttacgattttttgcagaaaaaaaaagagctcggggtaagctctttttttccaccgaattaatttccgttactaatccgatttttaataaatataaaatatatccttatgaaagggtattgggaatagatatattaactaactagggttaccagggggataaccttaatttattataacaaaatgcgacacaaaaatcaatattttttttgaaataaattataaaagttatttttataacaagtaagcttataaatttaacttttatagtaaaaataagtatatgtataatataatatatttattttatataatatattattttatcatatattgtattttataatatatttttgtaaggtatagtataagtatattatattttactataaaaatttgtaataaagtgaaaaaactagcttttcatgaaataatattttataatttaagattgtctttttaataaagattaacaaaaaaaatactataattagtggtataatagttagagttgaagattttaaataaaggtaggtgtaattaagttggaaatatacttagacaatagcgcaactacaaaaccttatcaagaagttatagataaaatggtttatgcacttaatacggaatatggaaatccttcttctgtccatagaaaaggtgtagaagttgaaaaagctataaaagaagtaagacaagatatagctaaatctctaggagcgaaagaaaaggagatttattttacatcaggtggtacagagtgtaataatactataataagaggtattactagtttaaataaaaaaagaaaaaatcacataatatctactaacatagaacatccttctgttttaaatacattaaaagatttagaagaagatggttttgaagtaacttatttagaggtcggaaaagatgggaaaataaatatagaggatttaaaaaatgcgataaagtcaactacatgcttagtaagcatgatgcatgttaacaatgaaataggaactatacagccaataggtgaagttggaaagtatttgaagggtttaaaagaaaaaatttatttccatgttgatgctattcagtcatatggaaaaattaattttagaccatctaaatacaatatagattttatgagtgtaagtgcacataaatttcatggtccaaagggaattggatttatgtatataaaagaaaataatcgccttaagcctatgttaacaggtggtggtcaggaaattggaattaggtcgggaacagaaaatgtacctggaatatatggtcttggagaagctgttagaatactaaacaaagatttagatgttgttatttcgaaagtaaataacttaaaaaatatattaaaaaatgaaataattgataatatagaagatataaaaatcaattctccagaagatggagtatgtcatatattaaatgtatcatttagagggacaaaaggagaagttttacttcattacctagagcaaaaaggtatttatgtatcaactggctctgcatgttcttctaaaaagaaaggtagttacgtattaaatgctataggtcttacaaatgaagaaataaatggaacaataagatttagtttatctgatatgaatacagaagaagaaatgttagaagctgtgaaagttttgaaagaatcaatttgtgacttaaggtcaataatgaaaagaaaataaagaatactgtatagatagtgataataaattagtttaagaggtgaaatggtgtataatatattaatagtaaagtatggagaaattggagtaaaaggaaagaatagatatatatttgagaataggcttataagaaatataagaaatatgttaaaaccaattggaagatttaatgtatataaagagtatggaagaatatatgttgatttagaagactatgattatgaagaagtaattgaagaagttagaaaagtatttgggatagtgggtgtgtgccctggagtaagagctaaaaaagattatgatacattaaaagaaatagctttaaaaatgttagaagaaaaaatagaggctggatataaaacttttaaggtagagtcaagaagaggagataagtctttcgggttgacttctcaagaaatgagtatggatataggtggatacttattatcaaaggtaggagataggattaatgttgatgtaagaaatccagaagttaaaataaagtgcgaatacagagaatttcatactatggtctatagtgatactatacctggatatggtggattgccacttggaacgaatggtagagctatgtctcttttatcaggaggtatagatagtccagtagctacatggatggttgcaaaaagaggtatggaggtagaggcagttcacttccatagttatccatttacaagtgaaaggtcacaggaaaaagttaaggatttagctaaaatactggcaaaatactgtggtagagtaagacttcataaagttaacatattagaaatacaaaaagcaattggtgagaattgtaatgaagaagaagctactattctttcaagaagatttatgatgaggatagcacagagactttctgaaaaaagacattgtgatgctttaattacaggtgaaagtattgggcaggttgcatctcaaactatacaagggcttacttgtactaatgccgttgtagacttaccagtgtttagaccacttatagcaatggataaatcagatatagttgatatagccaaaaaaatagggacttttgaaacatctatagtgcctgaagaagattgttgtagtgtattttctcctagaaagcctgtcactaaacctagattagagaaaatagaaaaatctgaaacagcacttgatattgaaaaattagtacaggatgctattgacaaaatagaggtagaggatattgagttttagcatacaagttatttaattactaaattgaatattgagtatattagtagttctgtaagtatattagtagttctgttgaaaggatttatgtagacaatttattaatatatagtatttaaaaataagtactataattttatttaatgggaatgattattatgaataaaaagggttttacattaattgaattgttggtagttatatctataataggaattttagttatagtagctgttccagcgttatttagaaatatagaaaaaagtaaggcagttacatgtctttctaatagagaaaatataaagactcaaattgttattgcaatggctgaggaatcaagtaaagacaagaatgaagtcataaaagaggtattagaaaacaaagatggtaagtactttgaaacagaaccaaagtgtaagtcaggtggaatatattcagcaacgtttgatgatggttatgatggaataactggaatagaaagcattgcaaaagtgtatgttacttgtacaaaacatccagatggtattgaaatggctagggatatacatcaaagtatgaaagatttgattgcatcatttgcacaagacccttctataataccaggagcttcaaagggcaatgatgattttagaaaatatttattagacaataaatataaaaatgggtggcctacaattccagatgaatttaaggcaaaatatggattaagtaaggatacactatatatacaaccatatgcatataatcctactaaatctgatgctactgtagttgtatttgcaaataataagactggaggtaattggtatacttccctagtttacgattatgatgaaggtagatggtataaaggtaaaaatggtatttctgttgcaggtaggtcatgggatgttgacacagatagtgttaagtctgtaaaaacagagattcattctaaagagggatggggtcctttaaattaatatatcatgttttattaatctggtattgattaaactatagaaaagagcagtttctatagatgacgaataccagattttcatttatatgtataattaagatatattaaaagtatttatatttttaagtcttcacatacaagctaaagataattataataatattgtaaagaaatttaattataagattaattttctgaagatttagtatttgtactaagaaatacataaaaaggggaatagatatgaataataattttcaagacaaccaaacaataaatttaatacaaagtcgtagaagtatacgaaaatttacaacagagcaaattagtgatgagcaagtaaacacattattacactgtgcatttgcagcaccttcaggatgtaataaacagccttggcacataactgttgtgcaagaccagaaacttttaaaagagattagtgatgatactttatctaggattcatgaagtgagtaatgttgagataaataaaaactttaagttattttatggtgctccaaccgttttatttatttcttatgatgaaagtagttcatgggctccatatgatataggaatacttacagggaatataacaacagctgcacaagcactagggcttggaagttgtataataggaatggttagaggtttatttacacctgttgaacaaggggatattgaaggtcttgtgagtgtattggataaagaagatgtaaaggaatcagagtcaataaagatgaagtttgatacaaataaaaaatacagagaactacttgatataccagaagggtattctgtaccatttggtattgctgtaggtattccagatggaaatttaccaaatgctagagaggtagtttacaaagtttccagagtttaggataaagtattgcaagaaccaatcagttacttgaagaattaaaccagtaatatacaaataaattgatggaagaggaagctatttaaaaagtagtttagatttttcattgtaaaataattaaataaagaataaggtgataagtattttatttattatcttattcttttttatttttgttttgtagaatgataaaaataaggattaagtgtaataaaatagaaaacaagtatgttaattttaagtatatgctttaaaatttatccaagttaaaaatttaagatatcttttcagtataatggaaaaaatgtcaaaatattgaaatagggaaaaaatagtgatataataaaaaaaatagagaaaaaaagtaacccttagttgtaaaaaagttactatttattgaaaatttagatacttttctaaaaattatctatgttaatagttaaatttatgaacattttttgtttttatgttaggatatttcttagaaatgaaatacttcttaatttgatttgatatgtatatttttatagctattttattataaaaaaaaagaacccttttacaacaaatggaaactatgtacgtaataattaaaataaaaaatattattttatatttataaacattgacattctaattctgtagtgtaatcgtattttttattaattcttataaaatcaatgaaaataaggatatccattttaaagtacataaatttaaaaatccagaaaaatatacttaaattatgtaagcaaaagaggggttgaatcggctgaaaatgtaatactagtaaatagtacatcaatcctagataccctgtaagcaactctattttcatgtactaaaaatgtacctattttattaactgaaaagaataaattaaatgtaagtacataataagagataaaaaattaaaagcaaaaaatatttatataaataaatataaaaaatgatataatccctattaaaaaatttatagatgatgaagaaatatcaaaatcttatattataggaagaggcacttctttgccaaaatatatagaaaagcaataccaaatccaaagagaataggctgagaaaaaataaaacaaattcaagagtaatagaaaagctttatagaataaagaactgagaactctttatataataaaaaatggacttttaagagaaaatgatttaataaatgatttaacatggtgttttagcaggtgaaaataaatcaccagtaatgattgtagaaaaattactttatgaatctcaaaaaaacttagttaagagtaagagatttgataagataactaaagttggggaaatgtgtttgatgagataaaaaaattagtaaaatagtataatctaaataagaatattttgttgattaaactacactaatagtaatattgtagggggaaaagatgagagaagaatcgaactctttaagtttagaccatatagaaattttctttgaacttttatctcaaagtacagaagattatatatttttttgggatataaataggaataaatttaaaatttcttcagcaatttttgatgaatttaacttaagtaaagagatagaatctgatttagtcaattgttggagtaaaattgtttatccggatgatgttcaaatatggaaagatgatatacaagaattactacatggaaaaaaaggtgagcacaatttagaatataggttgattaataaatatgaagaaatagtatggatttcttgtagaggtaaagtttatgtgtcggatgacccaaaaactatatttctagtcgggagaataaagaatattggtgaaaaaaataaatttgattctatcacaggaacgtggaatagagaacaatttgaacatagaatgaattatcttataaaagagaaaatttataaaaatggtgctatgtttatcatggatattgataattttaaaaatataaatgaaaaatatggacattcttatggtgacaaagtattgcgtgcaattgctactgaagtattagaatatcttccaaaagatgtaagattgtataggttagatggagatgaatttgcatttttttaccctatgtgtactaaagaaactatagagaaaatatatgaaaagatacagatgtatacaaatactcagcatgaaattgaatcaaataagtactattgcacagtgactgcaggagttgctatgtatccagaagatggagataattatttagatttatttaaacatgctgatattgcattggatatagcaaaaattagtggtaaaaatagaattaagtttttttcacaagagctctatgaaaataaactaaaggtaatttcaatgcaacaaaaactaagagagtgcgttgaaaataattttaatgactttgagctgttttttcaaccccaggtaaatgctgttacaaaagaggtaataggggcagaggtacttttaagatggcattcgagtacttatggagaagtatctcctgttgaatttataccaatactagaacagagtaatttaattataccagttgggaagtggattataaaagaagctgtaaaacagtgtaaagaatggcataaaataaatccagactttaaaatatctgtaaatgtatcgtatattcagttaaaagaagatttttttagagattttatagtagaatgtttagtagagtatcaattaagacctgaatttttaattttggaattaacagagaattgttggataccagatataaatttactaaatgataaatttattagtttaaagggtataggagtatatattgcaatagatgactttggtacagggtattcatctttaaattaccttaaagaactgtctgttaatataataaaaattgaaagaagttttgttaagaatattacatataatagttatgaatatacttttcttgaatatattattaaattagctcatattataaatttaaaagtttgtgttgagggaatagagtcttatgaagagtatgatatagtaaaaagcttaggtgtagatattattcagggttttttatttggaagacctgtaagtgcctctgaattttataaatttcaactatcaaagtgatgtacataaaatgagatatatagtatataaaaatagggcaaagtggaagttttgaagtttattaaaaatttacactttaccctattttgttatgtcttctataaaggattaatatactacactaactattatatactttcactccaaatttagagattatttcactagctttttggacatcttccttagtggcatcaggaacatcttttagttcataatcgatacctaaactttcccatttgtgtattcccatagaatggtatggtagcaattcaaatctttctacatttttcaatgtagctacaaattgacctagtttttctaaattatctatatcatcagtaatgccaggaactaaaacatgtcttatccatacaggaatatttcttgattctaagtgtctagcaagttttaatgccttatccataccaacaccagtcaaatcaatagatttttcctcaaccatatgttttaaatcaagtaaaaccaaatcagtattatctaaaactgggtctatagtttctatatctacgaatccagatgtatccaagcaagtgtgtatatcattttcttttgcttttttaaataattcacttaaaaattctggttgaagagtggattcaccaccagaggcagttatacctccaccagaaaacttcataaaagaagtatacttaagagcatccgttattatttcatcaactgtgtattcttttcctgatttaatatcccatgtatccctgttatgacagtatttgcatctaagaggacacccctgaaaaaataatatatatcttattcctggtccatctacagtaccaaacgtttctatagaatgtatctttcccttaatcatagagttcacctcacaatatattttaataaccttatcaatagttataatatttgtctaaaaaaggccatcttataccagaaataattcaaatataagatagccttttatttttattttttacacagtagtaatcttagttaaagtataaaaatttaaagactaagccattttaccgtggaatgttctgtttataacatctaattgttgctctttagttaattttatgaagttaactgcatatccagatactcttatagttaattgtggatattcttctggatgttccatagcatcttctaaagtagctctatcaaatacatttacatttaagtgatgagcattttgagagaagtatccatccatcattgcagaaagattgtttattctttcagtcatatcttttcctaaagcagcaggtactatagagaaagtattagatataccatcttgagcatgttcatatggtaatttagcaactgaagataatgaagctaaagcaccattagtatctctaccatgcattgggttagcaccaggagcaaatggagcaccagctcttctaccatctggtgtattaccagttttcttaccataaacaacatttgaagttattgtaagtatagattgagttggataagaatttctataagttttattttttcttattttattcataaagctttcaactaactctacagctatactatcaactctatcatcattgtttccgtattttggataatctccttctatttcaaaatcaacagctattccttgttcatttctaatagttttaaccttagcatgttttatagcagataatgagtctgcacaaactgataacccagccataccacaagccatagttctaaatatatctctatcatgtaatgccatttctaatgcttcataagaatatttatcatgcatataatgtattacatttaaagtatttacatataatgttgctaaccaatcagtgaatggttcaaatttactcataacttcatcataatctaagtactcagaagttataggttcaaatcttggtccaacttgaacaccagatttctcatctacaccaccatttatagcgtataataaagttttagctaagttaactctagctccaaagaactgcatttgtttaccaattctcattgcagatacacaacaagctataccatagtcatctccccagtatgctctcattaaatcatcattttcatactgtactgaacttgtatctatagatactttagaacagaaatctttgaatccttgaggtaatttagttgaccatagaactgttaagtttggctctggagaaggtcctaatgtatatagagtatttaacattctaaatgagtttttagtaactaatgttctaccatctattcccatacctcctatacactcagttacccaagttgggtctccagagaataggttattgtaatcaggagttcttaggaacttaaccattcttaatttcataacaaaatggtccatatactcttgtaattcttcttctgttacgattccagcttttaaatctctttcaaagtatatatctaagaaagtagatgttctacctaaagacattgcagcaccattttggtctttaacagcacctaaataaccaaagtataaccattgtacagcttcttttgagttagttgctggttttgatatatcaaatccataagattcagccatttttttaagttcatttaaagctgatatttgctcagttatttcttctcttaatctgataacttcctcatccatgcaagaaacttctaatgatttcttttgctcatttttatcttctattaaagcatcaacaccgtatagagcaactcttctgtagtcaccaattattctacctctaccataagcatctggaagacctgttattataccagattttctagcagctctcatttctggagtataaacatcaaaaactccttggttgtgtgtttttctgtatttagtaaatatatcttttatttctgggtctaattcatatccaaaagcttcgcatgaattttcaaccatctttataccaccatatggcatgacagctctttttaaaggggcatccgtttgtaacccaactattgtttctaattctttatctaaatatcctggagcatatgcagctattccagaaacagtttttgtatcaacatctaaagtaccaccattttctctttcttttttaaataggaccattgcttcgtcccataattttttagtattttcagtggcaccagctaagaaagagtcatttccctcatatggagaatagtttaattgtataaactctctaacatttatttctttagtccatcttcctgttttaaatccttgccatgcattcattaagtatttcctccttagatttaaatgataaataatactattaaaattattttttatatacttaatttattttatatatttttttaaaaatatattttctaatataataatatcatattattcgtatcctgtatacataaaaaataaaaaattgtcgctttaaagtataaaacagattatatgttaataatgtggtgaaattatacccatatataaataaaataaaacaaataaatagctaattaaggagaaaatattttttattttttgtttaggataaataaattttattatggaaaaaagaaaaagcatacatcttcacaaattgaatatttatttaatagggggaggtgatagattgtttatcacagtggtattatttttagtaggtttcctattaattactaaaggcgcagatatctttataaattgcactgtagagataggtagaaaaacgaatatatcagaaattatacttggagctactatagttagttttgcaacaacattacctgaatttacagtgtctctacttgcttctattgatggtcatactactatgagtttaggaaatgcagttggttctataatatgtaatacaggattagcattagggttggttgtttttataagtccatttaatgtagataaaaaaatgtttttttctaagtctttactattaatagtatccgttatagttttaattttattgagtttagatggagttataacaagaggtgattcattattacttataataatattaatcttttatatggttaataattatagaagtgtcgttggaaaatctgatactaaaaatagaaatattaaaaataacactattaaagacatatctactaaaaaagggaaaaattatagaggtttttccgtattagaaattgtaaaaatactattactttttgctacaggattgataatgatgataataggttcacaaatccttatagagagtggagtaataatagctagttttttaaatatacctcagggtatagtaagtttaactataatagcacttggaacttctctgccagagatagtttcgtcgattactgctataagaaaaaatcatcatgaaatatcagtaggaaatattttgggtgcaaacatattgaatatagtatcagtaatagctgtatcagcaataccaaataacataccaatactatctcaaaatagacaattggatataccattcatgatattattattattaatagtaataataccaacacttaaatctaatagacttagtagaatacaaggtatattgatgttattcacatattttctgtacatatcaattttgtatttcatgtatattatttaactatactgtttaaaatattaattgcagaatatcctaaaaaagtatataatggataggttaagattaattgataacggagaggaataatatatgaatataacaaagtttgaagatttaccaataagtgagggaataaaaaaagctatagctgaaatggggtttgaagaaccatctcctatacaagcacagtctatacctgcgattttgtcaggtaaagacgttataggacaagctcaaactggtacgggaaaaacagctgcttttagtatccctatactagaaacaatagacccaaataatagaagtttacaagctgtagtgctttgtccaacaagagaactggcaatacaagtatcaacagaaataagaaagttagctaagtattcgcacggaataaagacattacctatatatggtggccagccaatagatagacaaataaaatctctaaagagtggtgtgcaagttgtaataggtacaccaggacgtacaatagaccatatcaatcgtaaaacattaaagatggataatgtaaaaatgattatattagatgaagcagatgaaatgctagatatgggatttagagaagatatagaaatgattttaagtaagattccagaagaaagacaaacaactttcttttcagctactatgccaagaggaattttggaattaactaagagatatcaaaaagacccagagcatataaaagttgttagaaaagaacttacagtttcaaatacaaagcaatactatatagaaactaggtcatcaaataaattagaagtattatgtagattagtagatgtatatgaccctaaactatctgttgttttctgtaatactaagagaaaagcagatgaattggtaggagatttacaagcaagaggatattttgcagatgcattacatggtgacttaaaacagactcaaagagatatagtaatggataagtttagaaatggtacaatagatatacttgttgctactgatgttgcagctagaggtatagatgttgatgatgttgaatgtgtattcaactatgacttaccacaagatgaagagtattacgttcatagaattggtagaactggtcgtgctggtagagaaggtatgtcatttacttttgtatttggaaaagaaatgagaaagatgaaagatatagaaagatatactaaatctaaactaataaagcataatataccaacaataactgatgttgaagagaaaaaagtaggtactttctttgcacaagttaaacaaactatagaagaaggtcacttaactaaacaattacaatggttagaaggtttctgtaatgatgaagattatgcaatggttgatatagctgctgcacttgtaaaactatctctaggtgaagaaatgaaagaagaaataatagaagaaaaacctagaagagagcgtggagatagaaaaggtggtactggagctaaagatggtatgattagattatttatcaatattggtagaaatcaaagagtacaagcaaaagatatagttggtgctatagctggagaagttggaataccaggtaaagtagtaggtactatagatatatatgataagtatacttttgttgaaatacctaaaaaagatgcaaaaacagtaattgaaaagatgaaagatattaagataaaaggtaataagattaatatagaaaaagcaaataagaagaaaaaataacgtatagtatacaaaactataattagaaaatatataaaataatatattggatatttaaaaagcctgatgtgttttcaaaacagatagtagataatctgtaagagttaacagcataaggcttttcttgttttatatgatattatgattttccagatcgttgtgaaaaatgtatattagttcctttttttcaaatctgatttgaaaaagagaatattaattatctatatagtttagattataataaaaaatgtaagataacaaaggggagaaaaagatgtcaatgacttatatggaccctagggtttttttgattttagaaatggtgttagaagaagacacaaatactctagaacaattttcaaatgttttgggtgttagtactaggactatcagaaactatataaaccagattaatcgagaattaaaaggtggtattgctaaaatagttaaaaatgaaaaaggtacatatagtataagaattgaggatgaaagtaaattaattgagattgtaaattttaatagaggaaagctatcaaattttataaatttaaattcacctgatgaaagaataaattatgttcttgatattttaactatgaccaacaatccaattaccatagatgatttggctgaagagatatgtataggaagaacaacattaataaaggatttaaaaaaagcagacagaattttagctgaatatgatttagaattaaaaaggaagccaaatataggtatgattttagttggtgaagaaatggatataagattattaatccttgatagattgtatgaaaattatattgatgtcttggaaaacgttaatcagataaatttagttaaagattatgatattgaatgtcttagagatgaattaaaaaagttgtttaaaaaagaagaactctacataacagaacaggtcttgagagatgttgaaagatatataatcatgtctgtcttaagaaatctaaatgggtacaaatttgaaaagatagataagagatttgaagtgataagatgttcagatgaatatactttaggattaaagctcaaagctttattggaaaagatatttaatatagttttaaatgaaaaagaaaccatatttttgacaatgccattaataggtagaaaagctcctagtacaaaattagcacttagcagtataaagataaatgatagcgtaaaggaagttgtagatgaagtaactagttttttattagagacctcagggattgattttaaagaagataaaaagcttatagaaaatttggaatatcacttgtattttgcacttaatagaatgagattcaacataagggtaaaaaatcctcttttacaagaaataaaggaaagatatacatttccatatagtgttgcaaagatagctgcaatgataattgaggaaaagtttgacttgaaaatatgtgaccacgaaataggatatatagcattacattttggaagttattttgaaaaaaattcaagaaaagttctaaatgtaaatagggtagctgttgtttgtggaacaggtcttgggactgcacaacttattagaataaagataggaaaaatacttggagaaagtgtagaagtaaatactttttctgatatagaagctaaagctaatttagatttattaaagtattatgatttagtatttacaacagtagatttcaaaacagacttagatgttccaatttttagagtaaatgcgttatttaatgaagaaagtataaagaaagagatagaaaatgcaatacttttgaaaaatagtataaatcttaagtctataaaaaagattgaaaaaaatatcccttttataggtaaattaattgaagaggataagttctttatattgaataagagtacgtttatggaaaatttagaagatatgttagaaaaattagttcataaaggaattattgatatagagttcaaaaaaaaggtattaaaaagagaaaagaaatcttcaacagcattagataattatatagcattgcctcactcagttaatactaatggggaaaatctttatctgtcatttggaatattagaaaaaccagtggtttgggatacaaaggaaattagaataataatattgatgataattccagataagaatgtagatagtacagacctgataataaaaagttatgaagaagtacttgaagtagggagagataaaaaaatgatagaagaacttgctaaagtaaaatcatttgatgaattttataaaataattaccaagaggaggtaataatatggacccagtaatttttattatagcatcacttattacagtgtatttattaaatatttttcttggatacttacagcttaaagattttaataaaaattatattgaactaaaaagaaaaggaagagtggcaataggcagaaaaaaaggaagaatttcatcaggtacaattgtgttgatacttataaatgatgatggtgtgattgtcgaaactagaaaaatgcaaggtgttacagtattggcaagagtaaagtcatttgaaggtttggtaggaaagagcttagagtacatagaaaaatcagatttaactgtttacaataaactacttaaaaaagcaatactagatgcagtcaaacagtacataacatttgagaaaaataaatgtgaagatacaaataatctgagtactgatgaagagtgtaggatggaagtagtttaaaaaaatatatttataaggaggagttaatatgacgcaattttttcaagtattagcaagtggtgcagatagttttatgaatttatttagggcaggtgggcaacaatttgtaggttttgtaacagatatagtaccacttttagtagcattattagttacaatgaatgcaattatcaactttattggtacagatagagtcgagagacttgcaaaaaaatgttctgcaaatatatttactagatatttgatattaccagtccttggtacatttgtatttgcaaacccaatgacactatcactaggaagattcttgccagaaaagtttaaacctagttactttgcagcagcaagcttttcatgccatacaatgaatggattattcccacatatcaatccaggtgaactatttatatatctaggaattgcaaatggtataacaactttgggattctcaacagcagatttagcagttagatatttgttagtgggtatagttgcaaactttattaaaggtgtagttactgactatacaacaaaatttgtagagaaacaacaaggaatagcattaaattcagatataaagattggataattactttaaggtataaataaatttttcaaataaaaagatagtgtatagaggaggataaattatatggcatttaacaaagttaaaatagtaaaaggttctggaggatggggtggaccattgataatagaaccaacagaaaagaagaataaggtagtatatgtgactgggggagcaaagccagaaactgcagtaaaaatagctgaacttacaggatgtgagttaatagatggattttcacagggtgttaaagatgatgaaatcgcatgtgtaataataaattgtggtggaacattgagatgtggtatatatcctcaaaagaaaataccgactataaatataatgaaaacaggaaaaagtggaccattagcaatgtttataaaagaagatatatatgtttcaggggtaaaaccaacaaatgtagagcagttataattgaggtagtaggagggaagaaatatggcttatgatactaaaaagaagataagtgagcagagtcaaggaattgttgcaaaaataggtatagcactaggaaatgtgacaagtactctttttcaagctggtagggatactatagatacattaatacatactatactgccttttatggctttcgttgcagtcctaataggtataataaatcaatcaggtataggaaattgggtagccaatttacttactccattaatcggaaatgttggaggtttagttgtcttatcaataatatgttcatttccgttgttgtctccgtttcttggaccaggagctgttatagctcagatagtgggggtattggttggtacagaaataggaaaaggaaatattccaccaagtttagcattaccagcattgtttgcaataaactcacaagcagcttgtgactttataccagtaggtcttggtcttgcagaagctgaacctgatacagttcaagtaggagttccgtcagttttatattctagatttttaacaggtgcaccaactgttctattagcatggttagcaagctttgggttatataaatagaagaatactttataaataattagagagaggttcagttgatatggaattaatatacagtactcaaataaataaaataggagataatgcaaatgaatttttacaacataatatgtttgtaactttcaaagataatgctcctcaagagttagaaaattactgttatatacattctgaaaataatttagtaaaagaaatacttacgaatgatgtgttatcaataaataatgttgattacaaaattacttctgttggtgagttagtaaaccaaaatctttcagaattaggtcatataacatttaagtttacaggtgaaaaagatggagcaattggagggaccttatatcttgaagaaaaagaaatagcacctattggcgtaggtactatactaaaaataattagaaaataaaatttaaaacgaatctaatcatattataagtaaattatagataaaagtcaatttaactaatcaagttaacttttaatgtgataaaaaaggggaaatgaaaatgagaaaagtggctttagttgttggaggaggaagaagtttaggtgaatatttatctaaacatttagctaaagtaggttatgatgttgctattgcagatttaaatgaagacaacgcaaaaaaagtagctgaagaaatagaaactgaatttggttgtaaatctgtaggatatggttgtaatgccatagatgaaagacaggttataagcactgttaaagctattgaaaatgattttgatagaatagatttattagtgtacaatgcaggagtggctgtaagtaaaaaaataactgattttggatacaaagattttaaatttattgtagacgtaaatttaaatgggtactttctatttgcaagagaagtatctaaagtcatgatagcaaaaggtattgagggtagaatcatacagataaattcaaaatcaggtagagtgggaagcaagcataattcaggatattcagcaggtaaatttgctggagtaggacttactcaaagtttagcgctagatttggcagaacataagataactgtaaatgcactgatgctcggtaatttacttgattctgatatgtttgaaagtttaattcctcaatatgcagtaaaattgggaatacctgaatcagaagtcaagcaagtttatatagataaagtacctttaaaaagagggtgtagatttatagatgttgcaaatatgcttacattttatgcttcaaaggaagctgaatactgtactggtcaatctataaatattactggtggacaagttatgtaaggtttttatggagtgtctcaagatgaactctttagttcatgaggcactttttttgtataaaattaaatatattttcatcatttaaacaatgaaaaagaggtttatctttattttgagatagcctcatttttgtaattaagaaacatagtgtttaagtaaacatataagattgttagttttttaaaagagaattttttaataatattatatttatgaagtatttttaaacttaatttgattaaaaaatagctacgcacacttgtgactttagtcatgagttagtagctaaattagtcagcatatagggaaacttatatgtagagataggatagaacctatccaatactacttgaattgctaaaaacccctaaagctaaccaaactaaaacataagggtgaaataaacctaagtgtgaaagttacgaaagtagaaaaaattggttagatggtataaggttaaatcctaagtactttaaaatgggcaatcagcaggtaaactccgaataggagaaacttcaacgactattcctcttgagggaagtacactacaagttatcggtagtggaagtgggtagaccttaacggataatgccgaaggataagatatagtctgtgcttgcatgaaagtgtaagaagttcataagagaactgcataggtagtagcgaacttatgtgaacgacaacctcaaaaatgataaaagttaagacttacggttcttatatatgttatttaaaaataaatataaaaaaccttcaaaatacttgttttaagtaattgcatattttaatattatgataggtgatgaaaaatggaagttactcatggtagaggatatgcatataatatgtcaaatatagacatccagtattatggggagacatctttggaatcctagttatttcgttgctactgtatcatgctactgtatcagaaaatacagaggagcagataagaaaatatattaataatcagaaaaaacaagtaaagtgaggtgatagtagtggaaaaagcttataagtttagaatgtatccaaataaaaaacagcaagagttaattaacaaaacttttggatgttgtagatttgtatataataagtatcttgctaaaagaatagaagtttataaaaatgctaaagaaacttttacttataaacagtgtagttctgatttgaccaatttaaaaaaagaattaaattggcttaaagaacctgacaaattttcactacaaaacgccttaaaagatttagataatgcatataaaaaattctttaaagaaaaagcaggatttcctaaatttaaatcaaagaaaattaatagattttcatataaaactaacttcacaaatggaaacattatgtattgtggtcaacatataaaactacctaaacttgatatggttaagataagggataaacaagtacctaaagggagaatacttaatgctactatatctaaagaaccaagtggtagatattatgtatcattatgttgtactgatgtagatattgaagcatttgaaaatactaataatcagataggtttagatttaggaattaaagaattttgtatctcaagttgtggagaatttatagaaaatcctaagtatcttaagaagtcattaaacaaacttgctaaattacaaagagaattatcgagaaaaacaatcggtagtttaaatagaaataaagcaagattaaaagttgcaagacttcaagaacatatagctaatcaaagaaatgattttctacaaaaactatctactaaactaataaaagataacgatattatttgcatagaagatttacaagtaaagaatatgattagaaatcgtaaactatctcgcttaatttctgatgtgtcatggtcagaatttattcgtcaattagaatacaaggctaattggtatggtagacaaattgtaaaggtaggtaaattctttgcaagttcacaaatatgcaataaatgtgggtataaaaacgaggaagttaaggatttaaatataagagaatggatttgtcctagttgtaatgaaactcacgatagagatataaatgcaagtataaatatattaaaagaaggattaagattaataacaattcaaaataaataacttatgtaagaaccgtaggaactacggggatagcctgtggagaattagtaagacatattttagtatgcaaaattctgtgaagcaggaacactgtgactttagtcatgggaggttcagaaaatatagctatgttttatatactgtagttttgaacatagaaagtttaataaattatagtatatattaatttttaataaggtaagaaagtagaaagaaggatattttatggatataataaaaaaattaagtcatggatgtacattagattgtcatgattgttgtaaattcaatgtttatactaaagaaaataatgtagtaaaaattgaaggagataaaaatcatccttatacaaaaggttttatatgcaaaaaagggatggctcatttagatagattaaatcataaagatagaataaagactcctatgcttaaagttgatggagtatggaaagagatttcttttgataaggctatagaaataatggcagaaaagcttacatactataaagaaaagtatacatcaaagtctgtcatgcattatgaccaatatggaagtgggtctgtgctaaaatacataggagatatattttttaatttttatggaggtgttagcagacataagggtggtccctgttggagtgcagggatgcatgctcaaaaatatgattttggagtagctaagagtcatgctatagaagatatgttaaatagtaaaagtatatttgtgtggggaaaaaatccagcatatactacaattcatactatgcaaataattaaaaaagctaaagaaaaagggataaagatagtagtgattgaccccatatatacaaaaacagctcaaatagcagataagtatgtacaggtaaatcctggaacagatggagctttagctatagctatggcaaaaattatagtagaagataaattatatgatgaagaatatataaactcgtatgttattggttttgaagaatataaaaaatatttatcttcattggaattaagttttttaattgatgaatgtggtgttaaagagaatgatataagagagttagtggatttatatactaacaaatattcaagtataaatgttggatatgggcttcaaaaatataaaaatggtggaaacacaataagagcgatagatgctttaggtgctataactggtcaaataggatttagtggtggaggggtaaactatgctaataaagtttatccaagtgttataaattctgacccttacaatagccaatcatatggtgaagatagggagttttatgtaagtaatatcagtaaatttatagaagaatctttaaaaaatacatcaaataaagtaaattatgcatcagatgaacttgatacaacatcaaataaagtaaattacatatcagatgaacttgatacaacatcaaataaagtaaattatgtatcagatgaacttgatacaacatcaaataaagtaaactatgtatcagatgaacttggtatggcattacataaagtaaattgtgtatcagatgaacttgatatgacatcaaataaagtaaattatgtattagatgaacttgatataacatcaaataaaacagattatatatcaaatgaattgtataatttatctaataagtcaatcaaagataatattcctataaagatggctgtgataactaaaagtaatatgctgaatcaactgccagatttagtagaattggagagggtgttttcaaaaattaaatttaaagtatgttttgatatgtttatgactgatacagctactttatgtgacatgtttataccgtgtacaaatacactagagagtgaagatataatttatagctcaatgaccaatccatatataacctataatgaaagagctgtaaagccagcacataaattgatggatgaatattatttctttatggagctagctaaaaaaatgggattaaatgattatccttttgtagaaaagagaacttatttagaaaaagtgattgaaccacttaagcgttttgacaaaaatctggatatagaaaaacttaaaaacaattactttactatacataaccttgttgcttgggaagataagaagtttgagactccatctggaaaatacgagctttattcagaaagtataaaaaacttgggaataagtccaacacctgtatatataagcaataaatataaagaaatagaagataaaaatatttcttttagattattaactaatcatcatgcagatactttatttagtcagcattttatggacaaaaaatctatagctcaagcatatataaatcagagaatggctaaaaaagtaggtattgaggacaaagatattgtgatattgaggtcaaaaaaggcaaaaataaatgtacaaataaatatagatgatggagtaggtaattatatagtaaaaatgtatgttggttggtggaagaaacatggaaatcctaatagtttaacagacactggtatatcagattttggaggtcaggtaacatataatgaaagtatggtagaaataatacgacaaaactagttaaatttcattgaaggaataaaaatataattatagaattgattaaaagttactatttttacaaaactattgaaggagggatttttgatggtaaattattccttagaacataagaatctatacatagaatttatgtgctcagaactagaccaccatgtagccaatgaaataagggaagaaatagataacttattaagtgtaaatcaagtaaaaaatgttgtatttaattttgaaaatattaattttatggattcttcaggtataggcgtcatcataggtagatataaaaagatttctaatgaagggggacgagtttcagtaattaatataagttcacgagttaagaagatttttgatttatctgggttaaataaaattattggcatttatgatacgtatgaagaagctctaagttctttgtagggaggagtatgtgatgaataatattatggaagttaaattttcggcaatatctgaaaatgaaagtttagcaagagttatagtagcatcctttgcagctaagttagacccaacagtagatgagttagtagatataaaaactgctgtctctgaggctgttacgaatgctataatacatggatatgaagaagacagttctaagtttgttttcttaagatgtgagatagaaggaaatactataaagattatagttgaagatgaagggtatggaatagaaaatgtggagaaggcaatggaaccactttatacatcaaaaccagaacttgatagatcaggaatgggattcacagtaatgaaaagctttatggacgatgtagaggtaagttctgtaaaagataatgggactagaattgaaatgactaaaaaaataaatgtgcctaaataaagtccaaaagtgaggttttattatggaagtaactgttgccagagaagaaaaaaaacctcttcttagtcatgaagagactctagaacttattgaaaaagttcaaaatggagatgaagaggcaaaagaaatattaatatcaagcaatttaggtctagttaggagcgttgtatctagatttttaaatataggatatgatagagaagatttatttcagttaggttctataggcttaataaaatcaatatataaatttgacccaaaatttaatgtaaaattctctacttatgcagtaccaatgattttaggtgaaataaagagatacttaagagatgatggtatgataaaagtatcaaggtcgttaaagcaaatagctgtaaaggcaaagatggaaagtgaagctttaactaaaaaattaggtagagagccaagtatagaagaattagctaaagcaatagatgtagaaaaagaagatttagtaatggctatggaagctaatttcaatgttgagtatttgcaaggagttattcatgaagaggaaggttctccaatatgccttattgataaaataagcatgaaaggagaaagtgaagaagaaaaagtagtggataacatattgttaaaagacatacttggaagactggataagagagagcgtcaaataatagttctcagatactttgaagacatgactcaaagtgaaataggagagatgctcaatatatcacaagttcaagtatctaggatagagaagaaagtattgtctaagttaaaagaatatatatcgtgataatacttatgatatgtagaataacaaaatataataaatatattactaaaataaaatgtaataactttttatgttaagtttttaaattattaaaagatactaaaataataaaaagcattaaaaaagtaaaaatataaaaacaaggtgtctttatggaaaaatagattttttctttattaggcatcttttttattttttgaccaaactttagatagtcaaaataaataataggtttatttttttaaaattaacaaataatactttagagaggtgtttagtatggataaaaattataaaaaatatgtagaccaaataagcccaaaacctacatatttaaaaaactatacacttgcatttattgtaggtggaattatttgtatgatagggcaagcaataaatgatttgtatatgaaagttggaggtcttgataaactaggtgctagttctgcaacatcaataacattaatatttataggggcatttttaactggattaggagtttacgacctaataggaaaaagagctggagctggttctataattccaataacaggttttgctaactcaatagtatctccagcaatggagtataaaagagaaggctatgtattaggtgtaggtgcaaacttatttaaaattgcaggaccagttttagtttatggtataggttcttctattttatgtggaattatttattatatttttaagatgttttagatgatttttatttaatttaaattttattaattatgaagaaggtataaaatctgaaaatagctactaaagtaactaattgaaaaataattgtgcagatttaattaatattaaaaatttgaatagtaaaatgcaaaattaaaaaggtgtgaaaatatgaaaaataaaagaattggaaaaagaacagtcaagttagaaaataaaccaaccataatatcaactggaactatagtgggtcctaaggaaggtgaaggaccactaaaggactattttgatatgattatgactgacgatttatatggtgaaaagacttgggaattagctgaaagtaaaatggtagagactgcatcccaacaagctatccaaaaggcaggtaaaaaattgtcagatgtaaattatatgctaggtggcgatttaataaatcaaatagtgccagcatcatttgcagcaagagaactggctattccatttttaggtatatatggagcttgttctacaatggcagaaggtctttgtataggttctatgcttatagatggtggttttgctgatttagtactgtcaggtacatcaagtcactattgtacagcagaaagacaatttagattcccacttgaacttggaaatcaaaaaccaatgacagctcagtggacagttacaggagcaggaagtgtattattagctcctaatggagacggtccaaaagtaaagtatgttactgttggtaaagtaatagatgagggtattgatgatggtaataatatgggaccagctatggctccagcagcaatagatactatctactcttactttgaagatactaatgatgacccaaatagctttgatataattgctactggagatttaggtactcttggaaaacagatagcagaagactttctaaaagaaaaaggtgtagatatatcaaaagtttatactgactgtggtatagagatgtttaaccttaaagaacaagatgtccactgtggtggaagtggatgtgggtgttcagctacagtgtttgcaggatatatatatgataagttgagaaaaaaagaatttaacaaagtaatgcttgtatcaacaggagcactactttcaccgacaagtacactacaaaagcagacaataccatgtgttgcacatgcagtagtaatagtaaatgagtaggaagtgatataatatgttaatggactatgtaagagtatttattgtaggtggaattatatgtttaatagcccaagtaatgatggattatttcaaaatgcaaactccatatgttatggtaacgtatgtaacaactggtgtagttttaacttttctaggactttatgagccattagttaagtttgcagcagcaggtgcaacagttcctataataggatttggatattcacttgctacaggagtaataaaatcaattcaaagtgatggttttttaggtatttttttaggaggtacaactgctacagctggtggaatagcagcagctatattctttggatatattatgtcagtagtatttactccaaaagcaaaaccataaatctttattaaaagaataataagtttttgaaataataactttttataaagcaggtggatatcttttagattccacctattttttatataaagaagcgtttacataattgaagttgacaattatttacaacatagtgtagtattatattatcaaaataaaatgaagtgaagtaggggataaagatggtaactattaaagatattgcaaggaatctaggtatcagttattcaactgtttctaggtgcttaaacaataatcctaatgtatctgaaaaaacaaaaaagaaagtagtagaagaggcaaatagactagggttccattttaatgtaaatgcaagaaatttagcaaaaaaagaaactaacaggataggggtaatcttttcaaataattttaatcatcaagatactagaaagttttttagtgatataatggatagttctataaattctattgagactaataaatacgattttataatacagcctaataataacattagtggtgatagtaatgtatataaaatggtaaatggacaaatggttgatggattagtaattgtgtctcaatcaataaaaaaagaagagtatgattttttaaaagacaataattttccacatgtatttatatattttaaaccatcttttgtaggagaagtagacaatttcttttgggacgataacgtgtatggaggttatatagctaccaagcatttaattgaccatggtcataaagacataataacagtaacttcagatgataggagttcaaaaatgcatgaagatagaactaagggatatttaaatgctatggaagaggcaaatttaaagaccgaagtcattaaatctaaaatggattttgaatctcaagttgaatttttagaaaaatatattgataaaataaaaaaagcttcagctatatttgtacaacaagatgtacctgcgatttctataatacaagagttaaaaactacttatggtataaatgtaccagaagatatttccataatagggtataataatattgaattaatatcatattttaggtcgcatttatcaacaatagatgacccaagagagcaagttataaaaaatggagtagatagtttagtaaatataataaataaaaagagtacagaacacattccaagaaaattatatccaaggttaataatacgaaatagcgttaaaagaataaagtagtaagcttttaagtatcaaaagtttattaaaaatattatagattatgtgaagttttttaacaaacaatataaataaaaattaaaaggagtaggtgtatataagtacattgtactcctttatttattgagatagtttttataatatgaatgaataattttattcaattatttgaaaatccgttattttaacaatataaattaataaattatttgtattttatatcatgaatctataatatttttttgattcataactaaaagtatataaaaatgatgaataaatatatattatacattatcaatgataggttatataataaaatcactaacaattatattataagaaaattataaaaattacaaggaggtatagaaatgaaagaaaaagcagggattagaaatgccataatagcagcctttataatcacaatattggcagaattaattggacctatttcatttaaagttatgggaataaatgtaactttacttagtatactatgggctatattcataggaatggctgtttctcctcatttattagggagagttataccagccttaaaaaagtttataggggataatgaaataaatgtatctccatatttattatctttgacactatatccattaggaataatgtttggaattaatgcagggcctaaagttggtatattacttcaagcaggaccagcacttttattacaagaatttggtcatatgggtacaatgttgatagcattacctgttggagtagcattaggtcttggaagaagtgcattaggtggtactttttcattatgtcgtgacacagcactaggcattattggagataagtatggattaaactcaccagaaggtataggaacactaggaacttacataagtggtagtatatttggaacattattattttcatttttagcaccagtgggtgtacttttaggatttcatccatatgctttagcaatggcatcaggaatgggtagtggttcaatgatgggagctgcaacagcatcattaatgaatacggttccacaaatgtcagagcagattttagcatattcagctactagtggattgattacagctgttactggaatatatatagaattattcttatctttaccagtagccaactactattatagcaaagtagctccagttattgaaagatttagaggaagaaaaacaagaagaacaagtaataaattgtaaaggaggatatatatatggaaaaaacttttaagactattatggagcagataaaaatagtattgtttatatatattattacttgctttggacaaatgatagcacttaagactcaggctcaagatttgttgattggaagtatatctggatttttgttggtgataattgctattataataaagaattttgttaaaaaacctaatttaccaggttttgcatgggctacattagttgcattcgttttatcgcttccaatatctccagtgggggatatcatagcaacaaatgtagggaaaatcaattttatgtctacagtaacaccattattagcttttgcaggaatctctgtaggtaaccaattagatatattaaagactttgagttggaagttagtagttatatcatttatagttatgacatctacttactttggttctgcttttatatctcaaacagttttaagattaaatggaatgctttaaggaggtagtaaatatgaatgaattaaaagcaaaaattaaagaggaaataaagttattatctgaagagaaaaagacatcatttgaaaaagtttctgactatttattttcaaatccagaattagcatttgaggagtataagtcacaaaaagcattatgtgatttgttagaagaaaatgaatttaatgtaactaaaggtgtaggaggattagaaacatcttttgaagctgtgtattcaaatggaactaatgggaaaacagttgcttttctagctgaatatgatgcacttccaggaatgggacatgcatgtgggcacaatatcatagggacaagttctgttggtgcaggtatcatattaaaagaaatcatgaaaaaacataatatagaagggactgtaaaggtttttggaacacctgcagaagaaagagtaggtggaaaaataactatgattaaagaaggtgtatttaataatgtagatgctgcattaatcttacatccaagtgatgcttcaatgcctgatgatatatcatttgctcaagttaatttaaaatttgattttactggtaaggcatcacatgctgctgcttttccttgggaagggaaaagtgccttaagtggagtaatagcactatttaacagtgtaaatagcatgagattacatcttaaagattatgcaagagtacatggaattataactgatggaggtagcatacataatataattcctgaaaaatctacagctatatttaatgtaagagccttaagcatagaatatttaaatgagatttgtgaaatgcttaaaaattgtgctaaaggagctgcaatttctactggaactaatgtagaaatagttcaattagatgaaatatacaaagagattaagaatgattctgaattagtgaatatagttagacaaaattttgaagttttgggtgaagactatgttgaaagagatttaagtcaaggtataggttcaactgatacaggaaatttaactcatgagatacctgcaatacaagcatatataaaattaaaagaaaatactgcaactcatacagatgaatttgctgttgcagctggtggtgaagaaggcaaagtagcacttataaaagcaattaaggtgctagcaatgtgtggagtagatattttgtatagtaaataatatataattttaaaatatattaagaaaggaaatcggattagacatgatattaaaacaagtaatagaggtttatgacattttagataaagcaaatgctaatggggaagaagtaaaaacttacttacaaggttatggtgaagtagatgtaactgtaaaagaattgtcttcaagtaaaggttcaacagatttagtaaagcttacaattcctgggaaaaatggaaaattaaaaggtggagatgctcctactcttggtattttaggtagattaggagggattggagcaagaccagaagttataggttttgtctcagatggtgatggagcattggtagcaattgcagtggctgctaaacttttggatatgcaacgaaaaggggacatattagatggtgatgttgtaatttcaactcatatttgcccagatgctccaactaaagaacactatcctactccttttatggattctccaattgatatgatgactatgaatgaaaatgaagttgatagtagttgtgatgcaatactttctatagatactactaaaggaaatagagtaatcaatactagaggatttgcaatatcgccaactgttaaagaaggctacatattaaaaactagtgataaccttttagatattatgcagactgtaacagggaaatctccatttgtattccctttgtctattcaagatataacaccatatggaaacaatctgtatcacttaaatagtattttacaaccagcagtagctacagatgcaccaatagtaggagtagcaattacaacagagatgcctgttgctggatgtgctacaggtgcaactaattttagtgatttagattcagctgggagatttgcaattgaagttgccaagctatttggtagaaataagtgtgatttctatgataaagaagagtgggaaatgcttattaagagatatggcaaattaaatagatttcaaacatttggtatacagtaattagaaaaatattaagtttatataatttgtgatacaactatttaagaagatataaacaattaggaataaaagtaagaataaagcacttagttaaaaactttaaaaaaaaatatttatttgtttatataaaaaggaggattctggttattgggattctcttttttatgaatacaaataatatattgtaattataaaaaaaggagcgtttcaaagtgatttttttaatcaccttgagacaactccttatattttttatttaaattctattttttattgactgtatagctattttcaccatcataaggtggcatgaccttgaacagcgtggttttgtaaagttgggcaccacaaaacaaaaaatcaacaagcccttgtgtggtctgctgacgtgtttactatactatactttcccaaaaaccgcaagcactatgggaggctataaggcggcgaccattcaggggcgatcccctcgaaaccgggatagggttcccatgtgggacataataaagagcgccccggaggtatcaactaccatccggggcgctctttattatgtcccgtgggaaccatgcccacgaagcagggcgtacaacggacagataggtcctaccctcctgacagactggaatctcaatcccatcgaaaacaatcataacaatcatggcaagattatatacactcctgtaaaatatttttgtgtgtaccatgaagtactgcttgccactattgagaacggataaaagggaagtacgtattataccaataaggtgaacgaaacaaaatactcatttgataaagttaaataaacctgtcggaaccccaccaatccggcaagagctcactcaatttaacagttttttctgtttcgacattaactaaaatctcaatacaagcactatccttatcaagttgcattaaatattcacgacaagcaccacatggtgagccaacactcccattgctcatcacacaaactaatttagtaattttactttcgccatttgttatcatattggcgatagcatttctttctgcacacattcccaatgtacaggctgtatcaatacacacgccagtataaacatttccgctgtcggtaaggattgctgcggcaaccccaccagcatcgataaaaggtgaaattgtgcgtggatttaattttcccctagcattattataaagttccttccatttcatcaggttgatcctcctgttgtatccatataaataatcttttatacgccttttccgcctaaggcacacaacacattactcgcttttttcattctaatattcgtgcgtgaaaatgtcaaacggtttacttcgtttcattacttcatactgctgttcataaccctgtttgttcacttgggcaccattcgagcaccaatttacccgtttcagggttgtagcgaacacagcagaaatgctcatttcatgggcttttctggctagaaaaaaaattttatcgctgccagatatttactattttttattaagttgctggagttccaccaccatcaggaggagtagtagagccaccaccattatttccaccattatcaggaggagtagtagagccaccaccattgtttccgccattatcaggaggagtagtagagccaccaccattgtttccgccattatcaggaggagtagtagagccaccaccattgtttccgccattatcaggaggagtagaaccgccaccattatcacctgtgttattattgttattattattttcttctggttggttattgtctggtttttttgtatcttcagatgatggttgagaacttactttagtaggagcagtaccttcaataaatgctgctttagagccagaagattgctttcctccatcctctaaattaatttttgtaaaatatacatttttaggaacttcaaattcagtaaccgttaaattagcatgtattttttccataattttttcccatagttttgcagtactagtacttccatgtggtacttctctacgttttatagtgttaccagaatcatcttttctaccagcatcatctccaatataagttgcaccaacataataaggagtgtaaccgacaaaccaagcatcatatgcactatttgtagtacctgttttacctgctacaggcattccctttggaagtgtagcaacaccaccagtaccttcagtaattacgctttctaacatatctgtaacaacataagctacttcagggtctacaactttatgttcttcaggagcatttttaactaataattgaccatcaaaggtagttatagtagtaaaaatagaaggttctacataaacaccttgatttgccaatgtaccataagcagcagccatttgaagtggagtaataccattcgccataccacctagtgtcaatgatgggaattttctatcacttgcttcagatgaacctgagtgattattctttaaagttgttataccaaagttctttaagtaatccatcattatatctacacattcatcataagagtctccaagcatttcagcagttttgacagctatcgtgtttgaagatttagcaagtgctttacgtaaactcatagaaccatgaccagcagtagtagttcttggattccatttattattttcttcaaacttatatcctcctcgagaatcacttagagcagttgattgtgttatttttagggtatcaatagcaggtgtatatattgctaaaggttttatagaagaacctggctgatgagggttagtagcacgattcaaagtttttctaccacttatatttcttcctccagctagtgctcttatttcaccatttttataatctaagattaccattgcagcttgtggttggctaactccatcagggccgaccatatgtcctgggaaattgctatttctatcaaattcttcttctaaagcatcttgcattttagggtctatagttgtgtttacaattagaccaccattgtagaataagttttgagcttcatcatttgtatgtccttgttccattaaagcatttataacttcactttcgataaggtcttctacagatgaagaaactttatctgatgattgaggcaattttatttctattttagctttgattgcttcatcatattcactttgttttatatatttcaattctaacattttctttaaaacaatttcttgtctttttttagcttcagggttacttacagcctttctaacaactaatgtacctgcttttaattgtctataagtatcattagatataagctcccaagattttattttttcaatcatatcaaagtccacttgagtagggtcatctaaatcatcatcagttgtgttaacaaaaaataataatttattttctaaatcctccttagtttcatttccctctaacttagaagttttataggctgaaaatcttgatggatttttagttgaaccagcaagaagtgctgactctgctagagtgaggtcagctgcagacttatcaaaataaccacgtgcaccagcctcagcacctgctagacctctaccaacgaagaagttatttaaataagtttctagtattttatctttacttactgttttactcatctcatgtgcatagtaaatatcctttattttacgaggtatagtttgctgttcagttgttaacagcattttggatacctgcataggaatagtactaccaccttgcttagtacctgtaagggtctttaatactgacctaaataaacctttaatatcgacacccttatgctcataaaaacgctcatcttctattgcaattacagcatgttgaagataaggggaaatcttatctaatggaacgggtgtctttttatttacacttggagctgtagacaatgtttttccattagcgtatttaatagtagttgtttggttcgtctgtttatctaaaacagcttctgtaactggagttacatctcttagtgacgcaaatactagaccagcagtacctgctgtaccaacaactagtaaaactaaaaatactatcccaaatactcttagttttttaaatttatcgctttttttagattttttcttgttttttgttgaacgagtcttgttagctgaagttctattaattggtttatttgtattaccagatgagctaactttttttctcctgattttatttccatttttatcattatcgttattcataagattttaacctccttacttaatgcaatattataacacaaataggagtagttttgtaattaatagaaaaaatgaatttgctataatattctgtacattgtatatgtataaacgtaatatattaaaaagtctatatttttattttatttatttttgacaaatattataaaaattatgccaaagctacatataaataaataggaggggataattttgaatagaatagtagatagaaaaacaaaaaatgaatttagaaaaatcatagctatttttttagtaattcttttcttgtctgtatttataggcagttttatatatatagataaaactttaagaccgacaataacagttttagcagagactaaagctcttgaactagcaaataggtcgataaataaagctgttgctgagatggtagaaggaaaaataaattatgaagatttaatggatatacaacttgataataatggtaaaataactatgatacaagcaaacactataatgatgaatgaaattgcatctgcaatagctttagaaatacaagatgaattaaaaaaggataagacagcaagttcttacatacctataggaacagcattaggaagtcctatattagctaaatacggtcctaaacttgaagtgtctattgaacctataggaacagtatcagtaaactttaaaacggaatttgagtcttcaggtataaatcaaactagacatagaatatatttagaagctcaaacacaagttaaagtagtaataccacttataacttcaacaaaacaaattaaagctcaaatacctatttgtgaaactataatagtaggtgatgttccagaaagttatgtaaatattccagaaaaaaatctaggaaatgttttacctaacactggaaagaataccaacaagtaatataaagttgtatatttttaaataaattcaaaataatagtttataaataaaatttttggaaataatattaatataattttaataaaaatttatattttatactatgtaaaatatctaatatatttggtctgtaggttaaataaaagtacctttagaccaaatatattattaataacttaataacatcttaaaacttatttatttatattatttacaacatccatttaataaatacaccataacctacagctgggtcattttcaattgcatgtgacactgctccgattattttattatcttgaactattggagtaccactcataccttgtacaataccaccagtttgagctaaaagctttttatctgtaattttaattttaaaacttttactttctggatgtttttggttttctatatctataatttcaatattatattttttacacttattaaagttatcttgtaaaattatttgagcttttcctaatttaacttcatctaaagatgctactttatatttttttaaattggaaatatcaaagttattaatttgacctcttattccaaaatcagtattttctgtaaagctaccaataatattttctcgttttgcatttatacatccaacactacctttataagatttttctatattaaggtgcttagttgtagaaattgaacctgttttaataggtatttttcttgcattaccaacacttattggatgacctacagctccaaactctgatgtatctggattgatatacgttaaagtagcaaatccagaaagtaaattgttaaaactaattttttctaatatgtgtttggtagttttcattgttataagttgtccacctctatttaataaaatagatacttgtttttcttctggtaaagcatttaaggtattggcaaagtcactatatccatcaacttcagaattatttacctttactatagcatcacccaatctaaatggagatgcttctccaggatttctaactatgatattttttaattctgcgtcaatttgaagtacgtttccaattggtattaaatattcaggttcatttttttgtaaattttgtgcataaattaaattatttgagaaaaaatataataaaaataaaaatgttaaaacaattgtaaattttgacttagctaagttggtttttttacttaaagtattatttttaaaatgaaaatttttaagttgcataaaacacctctttcttattaaattattttaataatagaattgaagttttcttgctgcttctatattatgttgtgcaagaattatgttttgatgcttggaaaactgactcaataacaccttagttttcataaaaataaataaaataaatagtgtatatgataaaataaatacatattcatataaataaaaataaacaataactgtctagcataagaaaggagcaaaaaatgaaaaaatatagattgttagttacttgtataattgccatgggaatcataattataggaacatcaaatccagttagcaatttttacaagactacaaatttgattagttcaggaaatatcacaaatgaaaaagcagataaagatgaaaattcaaacaaaaataataaagataaaaatgaagacaaatctaattctaaaagtaataaagataagtcatcagaggacaaatcgtcagataaaaaaaataaaattcaaaaaaataaaaaacttttaatttgtatagacccagggcatcaaggaaaaggagatagcaatttagaaccagtagctccaggttcttcctctaaaaaagcgagagtatcttcaggaacagagggtattgctacaaaaaaaccagaatatgttctaaacttagaagcatctcttgttttaaagagtatattagaatctaaaggttataatgtaataatgactagagagacacatgatgtaaatataagtaattcagagagagcaatacttgctaatgataaaaaagcagatatggttgtaagaatacatgcagatagtttaaataattcttcaaaaactggagcatctatattgattcctgaaaaagatggaaaatatacagctcctatatatgaagagagtaataaatgtgctgaatttatcaaacagaatatggaacaatcaggtatacaaatcaatggaatcgttcaaagaggtgatttgactggatttaactggtcaaaagtaccagccgtattagtagaaatgggatttatgagtaactataatgaagacaaaatgatgtcaaatccagactaccaaagaaaaatgatgcagtgtatagctgatggattggatgcgtattttaaataagatatgaatagagaaaaagttaggttggtattattttcctaatttttatctctattttttattgtacataatgcaaagaagaagtttattttaggttaaattgtcgtaaatataactaaaaatattgggaatacttgatttaagtttaaaaagaatatattatagtatagaatgtgtaaaatttttttgagaggtgttgaaatgctagtagtagaaaatgtgagtcatggatttggtgcgagaacaatattagaaaatgtatcctttagacttagaaaaggtgaacatattgcactagttggtgctaatggagaaggaaaatcgagttttttaaatataataacaaagaagcttatgccagatgctggaaatataaaatggtcttcaagagctacagtaggttacttagaccaacatacggtattaagcaaggaaaaaactataagagaagtgcttagagaggcttttaagcatatgtttgacttagagcaagaaatgattgctatgtatgacaaaatgggagaagctagtgatgatgaaatgagtaagcttcttgaagaaacagcagagatacaaactatacttgaaaatagtggtttttatatgatagatgcaaagatacaagaagttgcaaatggtcttggtcttggagaaattggtcttgataaagatgtaactgacttaagtggagggcaaagaacaaaagtacttcttactaaacttctacttgaaaatccaactattcttatattggatgagcctacaaactatttagacgaagagcatataacatggcttactaagtaccttcaagagtatgagaatagttttgtcttagtttctcatgatattgaatttataaataatacatgtaatgtaatatatcatatggaaaatggagagttaaatagatataaaggaaattatgatgaatttgtaagacttaatgatataaagaaacgtcaagaagaacaagcttatgataaacaagttgaagaaagaaaaagactagaggattttgtagctagaaataaagctagagtagcaactagaggaatggctaacagtagacaaaagcaacttgataagatggaaatattagaaagaccaaaagaaaaaataaaacctacttttgcttttaaagatgctagagcagctagtaaaataatttttgaaacagagaatttagttttagggtatgatgaagcattgacaaaaccacttaatttccatttagaaagaggaaaaaagattgccttaaaaggaatgaatggtattgggaaatctactctattaaaaactttacttggaataataaaaccatttgaaggaaatgttaaattaggtgactatttggaagttggatattttgaacaagagagttcaagggaaaatagtaatacacctatggatgaagtttggagtgaatttccagggcttacaaactttgaagttagacaggctcttgcaaaatgtggacttacaaatgaacatataacgagtcaaatgagagtattaagtggtggagaagctgctaaggttagactttgcaaagtaatgttaaaaaatataaatttcttagtattagatgagcctacaaatcatttagatgttgaggcaaaagatgaattgaagaaggctatcaaagagtttaagggaacagttcttttagtatgccatgagccagaattttattcagaaattgttgatgatgtatggaatatagaagattttaccactaaaatcgtgtagtgatttaacttattgctggggggatttcatgaaaaagtttctaaatgtacttttttcagtttgtattagtattgttataatagtaggtgttattaattttactgttggatttaaacaactttattattttgacattgattacttaaatatatcagagttatctggtttatctgaagatgatataaaattgaactacgattatctaattgattataacttaaataagaatgtgtctgagttcaagttaccaacattaaaatcttctccacaagggaagatacattttgaagaagtcaggaatatatttcaaaatataaataaattagctaaattattattggtagtttttttagtaggaattatattgagtgtaaaaaataaaaatataaaaatcttgaaaactacatcaataacacttataattatgccattattattaacagttccaattttattaaattttgaaaaatcatttattatttttcataaattattatttagaaatgattattggatatttaatccaaatttagacccagttataaatatattgccagaggaatttttttttcactcaggaatgatgattttaatattaattttgttagcaagtatcttactatttgtaatgtatagattatataaatctttcaaaataaaataagatagcaaaaacgaattatattaaaggttatacaataaaaatagctatgtaataatatttaaactaagagtagtcgataaatatttatgcatagctatttctaatagaaattactttttactagtgattttaactaaatcttgaaatttgcccataatgtaattgtaattatcttttttgtgaggtaacatgcaactactgcaatctttgatacctttatctgtatacttaaagtttccaccacagttttctcctaaagcatacaaaggacaatagcaaaatagacagttaaactcttctggtttattagttttatgacaagggaaaaattcgcaatctttgtgattaaaaaacttataattttcgcccatattttcctcctaattaaataaaatttaaattttttatactatataagattttggtgataatataattatactaaataattttatgaatagtcgataatatagtattattaatcatagtattaatggtataattagtcaacagaaaaataatgtaaaaattatgtaagtgtattttgtaattagaatatgttttataacaaaaaatgaggtgattaagtgaaagaaattcaagaaaaagcacttcttgtaggtctgaatttgactacaatagtgaaaaaaaatgatgatatagacactagtgaatctatggaagaattaaaagagctaacaaaagctgctggggcagaagttgtaggtagcttaattcaaaataaacattctgtagatgcagcttattatataggaaaaggtaaagtagaagaaataagagcctatagtgactctttagatgctactttagtaatttttaatgatgaattatctggtgctcaaatcagaaatatagagaatgttgttggaagaaaagtaatagatagaactactttaattttagatatatttgctcaaagagcacttagtaaagaaggtaaattacaagttgaattagcacaattaaaatatagattgccacgactttatggaatgggtggtgagatgagtagaacaggtgcagggattggtactagaggtcctggagaacaaaaactagaaatagataagagacatatacttaataaagcagcagacataaggcgtgaacttaaagaagtaaaaaagaatagggagacacagagagttaagcgtttaaagtcaaatataccgattgtagcacttgttgggtatacaaatgcaggaaaatctactcttttgaacgaattaataaagacacacaaggattatgaacaagaaaaagaagtttttgtaaaagatatgctttttgcaactttggatgtaactctaagaaaggctcttttgccgaataaaaaagaatttttagtagtagatactgttggatttgtaagtaaacttccccatgatttagtagaggcgtttaaagcaacattggaagaagtacagtatgcagatttaattttacatgtaattgatgcgacaaatactagttatgaattgcaaaaaagtacgactgaaggtgtattaaaagaacttggtgtaaatgataaaaaacatatacttgtatataataaagtggataagctagaattggatatatatcctaaaagtcaagaagatattgtgtatatttctgcaaaacaaggcataaatatggataagctattaaatatgatagaaattgctttaatggaaaatacttattcagtaagcttgatgttaccttatgagagaggtgatatatttagtagaataaaagataaatataatgtggagaattttgagtatggggaaaatggcataacgctagatgtaaacttcgatgaagaagattttaatatctatagagagtacatactagaaaaataggttgaatatggatataaattgggaaaatatagataatcttgaagattattttataacctatcttctttataaagaatctaaaacagtatctcaaattagtaaaattagaaatatttcaagtactgaagcaggtgagcaacttatacaagcaaaattaaaaataaaggaaatgcaaaaagatgattttgaggcatctaaggatattttagataaatttttagaactagataaaattaagagacttgattttatggatagcttagatgacgaaaaaatggtatactttaagagaaaggttttcaaaagaatccttgtggaaaaaaatgctgaagatttaattgttttaatttgggcgacaggtgagctaaaagatgatagattcttaaagttgcttcatcagctcacaaaccacagacactcagatattagaagaataacttattcagcaatcagaaagattgaatcaccaagtagtagagaagtactgcaaaaaggtctctacgataaaaatgcacaaactagacagtattgtgcaaaggctctttcaaaactaggggatgaaaacagtttaaagattttacagcagttgaaagacaagaataagaattttgaaaaagaatatgtgcttagagcttatgacgaagccattaagtcattggaaaatgcaaaaaatttgaaaaagtaattttttattaaagcaatttgtttacttaatgatgtatttctagagtttaacaaggtaataaataaattaatgggaggggtttcaaatgatagtaagacgttgtgcaggtggagtagtgttttatgctaataaagtacttattgtaaaaaatgataggggagaatggacacttccaaaaggaaagatacttggaggaggacttccatatgagagtgctgttcaaagagttaaagtagaaactggcatagatgctaaaatgatagatgtggctggcgatactatgtatgaatttttctcaagaagtagacaacaagaagtttgtaatgcaataatgtggtatgttatggaagcttgtaacactaattgtgtacttgctcctgaatttcaagaaggtggattttataaagtaaaggatgctttagatatgttatcacatcataaagagcaagctttagtagaagtatcttataaaaagtttaaggaattaaagaaattagtttcagagggcgatgatgttccagcaaattaattgtgaatttagaggattctgaggaagggatagccccttccttttttaattgaagcagttttaagcgtaaattatatagtctctttaaattatgatttatcaatttagagctttagtagtttatatttaaaatcagtaagatatatttaaaataaaaattaaaaagtatacaattttattatataattgtcttatgatattgattaaagaagtattaaaagtccatttatttttaaatagaataattttatagatatataatttgatgtgtatattagaaaatgattaaaataggaggaaatacaatgagcaattacaggacattacatgaatttggaacagatgaaataactattgaaaagtctgtttttattggatatgctaagcctataaagagtgaagaagaagcattagagtttataaatgaaataaagaaaaagcataaagatgcaactcacaatgtgtgggcttatactgtaggtaaaaatatgaatatacaaagatatagtgatgatggagaaccacaaggaacagctggaatacctacattagaggttataaaaaaagaagatttgagagatgtagtggttgttgttactaggtattttggaggaacaaaattaggtgcaggcggtctagttagagcttatacaaaaggtgctaaattgggacttgaagcaggtaagataatttataaggtaatgtatcaagaagttaaggttaagatagactatactcaacttggaaaagtgcaaaatgagttaatgaatttggggtattttataaaagatactgtatatgaggataatgttgagatagtagtgtattcaagattagaagatgtagagaaattatcagaaaaaatgattgatataacaaatggaacaggaaaaataattttaggagaggaattttatttgtctgaacaaaatggagaaattttaatataatctaaaaggttattagaatagttaatacctcaaatagccaattagtatttttaagtgaaaagccattaaattgatttaatctaaatcaatttaatggctttttatcggattttgcacagaatcctttttttacttcaaataaaccgactaaaagtaaaaatatcccaaatattttttttaatatatctgaagacagataattagctaatagtgaaccaaatacagctcctaaaaccccaaacacagctataggtataaccaatttaaaaattacatttttattttttatatgtatagcaagtgctataagtgtcatagggatagatgaaagtaaatttacgctttgtgctattttagtgtctatgccagcaagtaaaacgagtgcaggtataaggattgttcctccacccattcccattcctccaataattcctgcaaaaaatccaattagagcaaataacattaaaacaccatccttaatgctgcaattatcataattattccaaaagaaattctaagaaactttccagtaaccttatttagtaatttagctcctataataccaccaagaatacttccaactgcaactttaattgttaagttaacatcataagtacctttagatacatataaaacagaacttgctgtcgttaagaatattattatagaaagagcagttgcatgagatttatgttcttctaccttaacgatgtcatttaatattggaactaaaagagtacctcctccagaaccaaaaactccatttataaatcctgtaaaaactccaattatcgtattttttaagttaaaatcaaagtattttttctttaaatcatcagtttttttcataaaaatcaccttctgaaatagttttaccaaaataggcaaattatatttatataaaataagattaaatataatctttcatgtttgtttaattttgcataaaaaaaaacatattaaaacaacatattaatatatggtataatatattaaaacaaagtagcaaatttgagaggagataacaatgtcaaatataaaaatacaaatagacaaaactgtagaatggcttataaataaggttaatgaggcaaatgcaaaaggattaattgttggtgtatctggaggaattgattcggcagtagttgctaatttaattaaaaaggcatttccagaaaactctatgggagttataatgagcataaaaagtaatcctcaagatagagaagatgcacttaaggttatagagggatgtgatatagaataccttgatttagaccttatagaaccacaaagtgctatattagacatggtagtaggaaatttaaaagataaacatttatatagagcagaatatttaaagatgacagatgcgaacttaagagcaagagtaagaatgagtacaatttatacaattgctaacaatctaggatatttagttgttggtacagacaatgctgcagaaatacacacaggatattttactaaatttggtgatggtggagttgatattttacctattgcaaatttaactaaaggagaagtatatgaatgggcaaaagagcttggtgttcatgaagatttaataaacaaagctccttcagcaggtctttgggaaggtcaaacagatgaagatgaaatgggaactacttacaatatgatagatgctgtgttagaaggtagattggatgaagttcctaaaagagaccaagagataatagaaagacttcatagattaagtgaacacaagagaaaaacgcctgcacaacctcctaagttctaatttactatttataagatttgtgataaaatttacaagtgatgaaaattagaataattaattgtacgtattaaggagtggaaatatgggacgtataggtaatataattaatagaaaaggtaaacaagatgctcaaagagcaaagatatttactaaacatgctagagcaatagcagttgcagctaaagaaggtggagcagacccagagtacaatgcagcgttaaaaacagctatagaaaaagctaaggcagataatatgccaaatgataatatagatagagctatcgctaaaggtgctggagcaggcgctggagaagactatgaaactatagtttatgaaggatatggacctggtggagttgctgttatagtagaaactttaactgacaacaaaaacagaactgctggtaacgtaagatactattttgacaaaaacggaggaaacttaggaactagtggatgtgtgtcttttatgtttgataaaaaaggacaaatattagttggtttaggagatggagtttcagaagaagaattgatggatgttgcattagaagcaggagctgaagatttcataacagaagaagatggttatgaaataataactacaccagaagatttttctagtgttcgtgatgagttaaaagctaaaggatatgagtttatatctgctgatgtgaagatgatacctcaaactacgactgtattgactgaagaatctcatttaaaaatgatgaataaattagttgatatgcttgaagaagatgatgatgttcaagatatatatcataactgggaagtagaataaatagtataagcatattgaaatttataagcattgaatcaattttaacatgtgataaattttatagaataagaaattactaaaatagacatacgcacctctaacctatatttgcataataatatgtaagtataggtaaggggtgtttttatatttataggttaagaaatttaaagtaaattttgagctggacttgattgtctataaataattgatgggtatataacttgttgctgaataccatttatacgcccagttactgtatcaataatcatcctaagactacgttctgctgtctcttccatttttaaatctataactgtcaaaggaggaatacttcttgccattagtcgtgaaggtccattacttgctgcaaatatttgaatatcctctccaattacaattccagattcatgaaatgcattcatcataccaagagctacaacatcatgattacaaaaaattactttttttagtgaattttttgcaagcattttttgagcaatatcatatccactatctattttattagaacaataatatatagaatctgatagatgtattccatgttctttacatgtttttaaaaaagatttaccccttaaagtcatacatgtaaaggaagttgggttgaatacaacagcaatatcatttttaccattttgaatagcatgtaaagctgctatacgaccagtttcctcattatcaatagatacacttgaaaaaccaggtatttcacgatttacaacaactacaggaattttaggtttattttttactagatattctatatcatcagcattgatacctgttaaaacaattccatcataataattatttgcaaaaaagtattcatcatcacatagatgaccaactttgtaaggtcgtatgatgatatttatgtttaaatgttctaaagaaattatgtggtttattgcttgaagtatattggttgatgccaactcaaatccctcatcctgccaataaaaagctattttaatattattatgtttaataggagtagagcgtttatatccaagcttatcagctgaatttaatataagctcttgtgtatgtagcggaatcctgcgttcatttcctttaccacttaagacgtacgagacagttgctgaagaaagaccacagtcttttgcaatatctttgattgttgccatgataaaatcctccttaaatagttgcttaaatttgcttataccaataatcttaacatatattcaactaaagaacaatattctacaaggtgcatattttacaggattagaataaataaatttaaaaaaacttcttacttatgttgacataatttagtttataggattataatatgcttaaataagcttattattaactcaaattaagcaaagttaagcaggaacatgcaatgctagcttgcaatgtgactgtaaagggggaaaaggtatgagtaaggtaaatatatttgaagttggtcctagagatggatttcaaaacctgaaagagtttttagaaactgataaaaagcttaagattattgatggtcttattgcttcagggattaaacaacttgaaattagttcatttgtaagcccaaaagcaatacctcagatgaaagatgcaaaagaagtagcaacttattgtgtagaaaaatatcctgatgtgaaactttatgcattagttccaaatttatatggtgctaaagttgcatgggagtgtggtataagagatatatcctatgttatatctttgagtgaaactcataataaaaaaaatataaatcgtacccatgaagagtctattgatgagcttaaaaaaataatgaatacttatccagacatgaatatatgtattggaatggctactgtatttgggtgtccttttgaaggtttaccaaaaattgaagatgccataagatttgctaaacgcctttgggaaaacggtatcagggagataaatctagcagatacaatagggattgctgaccctaagcaagtaagagaaactattagtgcattagttgaagctttaccagagtgcagatggcaggtacatattcatgatactagaaatatgggaatggttaatactcttgtggctattgaatctggaattactactgttcagtctacacttggaggattaggaggatgcccatttgctcctggagcatctggcaatactgcaactgaagatttagtatatatgcttgaacgtatggggtatgatacaggagttgattttgttaaacttcttgaattatcaaagtatcagaagagttttgtaaatggagtatatagtggtcatcatgtaaatataaagtctgatagttgtaattgttagttctattgattaatcgattaaaaaaatatgttgattaaaaaaatatgctgattggtaaaatagatttattgataaaaaagataaattataaaatacattatctaataaaacaaataaaaaaattgagggggattagtatggatattatagctttacttttatttttaggagttattattattgcatttgtacgtaagaataatgcaggtattttggctctagctattggtgtcatagctgttagaatttttggaatggatgataaagaactttatggagctataagcaactcaatgtttactacacttgttggtataacactactctttgcaatagtgaactcaacaggagcattaaagcttgttgcagaaaaaattgtagctgcttctggtaaacgtgtttggcttatacctatagcagtttttatagcaggatttgttgttgctggtgttggacctggggcaattccagcacttgcaattatcccagcaatggctgttcctgtagccataacggttggttataatcctgtaatgcttgcacttataggtgaatgtggattaatggcaggtcgtatgactcctattactccagaaggtcaaattataacaaccgttgcagaaggggttggaattgaaaatgttatgcctactatcttagcctgtcaaactctttctacaattgtattttcaatagtattgtttataattttcaaaggatataaacttaaaaaacctataaatgttatagatagtaagcaaatagaaaaatttaatataaagcagataatttctctaataagcatagtagttatgattgcttttatcataatttttgatatgaatgttgggcttgcagcttttgcagtttcagctgtacttatttttttcaatattgctgatgaaggagaatgtatcaaatcaattccatggagcacgatagtaatggttcttggagtaggtgcaatgatgacaatcgtagatgcagcaggaggtattgacttgatgagtaatgcattatcatcactgatgaatagtaaaacagctactccaattatgagtatttcagcaggacttatgtctatggttagttctgctttagcagtagtttatccaactatgatgcctatgtgtgttgatatagctaaggcagttggaggagtagacccactagcacttattgctgcagtcggtgttggaggttctcttgctggtgtaagcccactttctactggtggggcattgattttagcagctatgggttcaagtaagaaagactttaataaggaagaacaaaataaggtttttgtacagcttttcattatgagtgcagttggcttattggttattgcagtagtatcaatattatcatttaatgcaataacacatttaatgaactaattataataactgaaaataattcattaaatttaatttttaatattaatcaatataatataatttggaggggaagttatgaaaaaaggagcattaagcaatataaaggtacttgaccttacaagagttcttgcaggtccatattgtacaatgatgttggcggattttggagctgatgttataaaaatagagatgccaagaaaaggtgatgatacaagaggttttggaccttttgtaaatggagagagtttatactatgcaaatataaatagaaataaaaaaggtatcactctaaaccttaaatcagaagaaggaaaaaatatatttttagaaatggtaaaacatgctgatgttgtagtagaaaattacagaccaggtgtaatggaaaagttaggtctgggttatgatgagttggctaaagttaacaatcaaataatttatggagctgtatcaggatttggatgttatggaccatattcagaacgtccaggttatgatattattgcacaggcaatgggtggtcttatgagtataacagggcaagaaggaggagaaccaacgagagttggtaatgctatgggtgatgtactaggtggaatgaatttaactattggtatactcacagcactcaacgctagaaaaataataggaaaaggacaaagagtagatgtttccctcgttgattctgttgtatcgtctctcgaaactggtatacagagatactttgattcaggacaacctgaacttatgggtaatagatatgcttcagcctatccttatgactcttttaaggcaagtgatggaagttttgtaataggctgtggtaatgacaaactttttgaaaagttatgtaaaaaagttctttttagagaagaccttttaatagatgagagatttaaaacaaatcttaagcgttgtgaacattacaaggctcttaaaccagaaatagaaaaatggtctgttaagcatacaataaaagaagcagttgacttaatatcagaggctggagttcctgctgctcctatctataatcttgattgtgttacaacagatgaacatatagcaaaagcaagagaaatgattgtagatattagtcatcctattataggaaatatgaaagtcaatggaaatccagttaagttgatgacaacaaaagctaaaattgatatgccagcaccatctctaggggaaagtaacgaggagatttataatggttggcttggttttgatagtgataaaataaaagatttaaaagaaaatggagttatttgattaaaaaatagctaaacacacttgtgactttagtcatgggaggttcagttagaataatatcaaaaaatattaaatcaatactgtaaatcaaatatagaattgtcagaagcatttaagatgggaaaagctacttagacattgagtctttgtggcttttcctattttcattaagaactttatattatcagaatagatatgtactaaactaaagtattaacaatttaaattaatagaaaataaactacctaattatgttgaataaagactactttagtgaaaataaacttatagagatgctatttaaattattttaatggaaatatcaaaaatgagactgcattctcaaaaatgagactgcgttttttaagtattttctcgaaaatgagacaaaaatattgttttatgagttttattgaagaaaaattcttctgtgaattacaatttaatcaattttaaagttgaaaattattaaaaatttagtgaaatttatgtatatttcgtttattttattaaaaataacaattttttactaaaaataaagaacttcaatggtgattggcatagtacttgctattttatattaacaagaaatgtagaaaaaataacaatgtataatggggggaatatgatggaatctgtaatggaaaatttgaacaatcttaaggtggaggttaaggacaaagtctgtgttattactataaatagacctaaagctttaaatgctcttaatagtgacactcttagggaactatcacaagttattgatgtagtatcagaaaatgaggcaatattaggagttattattactggagaaggtaaagtttttgtagccggtgctgatatacgccagatgcaaaactataaaagtgaggaaggcagaaaatatgcaggttatgctcagggaatttttgataaaattgaagctcttgagaaaacagtaatagcagcagttaatggatatgcattaggtggtggatgtgaacttgctatgagttgtgatattagaattgcatcagaaaaggctatatttggacaacctgaagttaatttaggagttattccatgttttggtggaactcaaagattatcaagacttgttggaactggaatagctaaagagttaatttttacggggagacaagtaaatgcagaagaagctaaatctattgggcttattaataaagtggttccaagtgatttacttttagaagagtctatgaagatgatgaaccaaatagttgaaaaagcgccaatagcaataagatatgcaaaagttgttattaacaaagggatagatatggatttaaagaatgctcttgaactagagaaagatattgcaggtttaacttttgctacaagagataagcaagaaggaatgaatgcatttatagaaaagagaaagccagtttttgaaaataagtagctattataactaaattggaacaatgtagaatatattcaaaatctaaatttcgtgaaaaaatacatatagtttaattttaaaaggagttaatttatgaatacgggagtaattataagtttagtagggattatcatagctctatctcttctagttgtaatggttatgaagggaataaatatttttattatagcaattgtatgttcatcattagttgctataacaggaagcctaaatgtgtatgatgcacttaaagtggattatatgacaggatttgttggatttcttcaggcaaatttctttattttcctaacagggacattaatgggaaaaataatggagattactggtggagcaaaatctattgctaagatgattgtaagatggattggtaaggataaagcactactttctattccaatagcttgtggaatattagcctatggtggagtaagtgttttcgttgtaagttttgcagtgtttccgatagctttagaaatttttaaagaagctgatttgccacgaagatttataccagcagctttgacttttggatgctcaacttttgctatggttgcaccaggggcaccacaaattcagaatattgttccagcatcaacattagggacagatattatggccggagcagtaaatggttttatatcatgtgcagtaatgtttatagttggaagtaccattttgtacaaaatggtttcaaaagaaaaagccaatggtggtcattttatagcacatgaatcagatatatttgatgaagcagaagcaactaattctaagagagaaaatggtcctaatggtgtaattgccttaattccattgatagtgtcaattttaataattaatgtaaaagttaatggaaaagcgatagtaccaattgaggtgggagtatttattggagctttattagtatatttattgttaaataaatatcaagataatactaaaatagttggacatgttggtgatgcatgtaaaactacagtagtagcaatatgtaatacttgtgctgtagttgcatttggttcagtagtaaaatcagcagttggttttgacttcatagttaatgccatgactaatattcctggtcctcctattgcaggggctgcagttggaactacagttattgcaggtatttgtgggtcagcttcaggtggactaggaattgcagctccacttcttggaccagtatttttagccaagggtgtttccgctgcagcattaactaggactatggcaatttcatcagcagcattagattcacttccacacaatggatatattgttactgtaacaaatggtctgtgtaaagaaacacataaggatgcctatatgccaatattctgggtaactgttttaactccgtttattggaaccatagtagcagtcctactgtttacaatgttcccgggattgccataagagaaaagataaaaggtataaattatattttgatattataaaatcaattttcaaaatatatacaataaatttcatgttttaatactataaatatgtatttaaaataacaaattgaccatataaggaggaattgaaagtgttaaataaaccattagagggagttaaggttattgacctaacgtattttgtagcaggtccagggacttctaaaatattagctgattggggtgctgacgttattaaggtagagccaagctttggagacccaggaagaaagacaggggcaacaatgacaatgccaatagatgattataataatcctttttacagcacatataattcaaataaaagaggtttgtctataaatcttaagagtgaaactggaattgaaattatggataagcttttaagtgaagcaaacgtatttgtttcaagttatagaacaggagcattaaaaagactaggtcttgattatgaatcattaagtaaaaagcatccacaccttatctggggtcagataaatggttttggcgattttggacctgctaaggataatgcaggatttgatacagttgccttttgggcaagaagtggggctatgcttgatatagcagaaaaagatacaagtccaataaatccacctatagcctttggagatgcaacaacttcttgtagtttatctggaggaatatgtgcagctttgtaccagcaagctaagactggaaaaggacaaaaagtaatggcatctttatttgggcaagcaatatggaatgcatcatctttattagcatctacacagtttagtgatgagtatccaaaaactagaaaaaatgctatttcaccagtaataaattcttatcgttgtaaggatggaaagtggatattcttaagtattttagagcatgaaagatattttgaggcactttgtagattatttggaagagaagacttaataaaagaagagaaatttgcatcttcagtagaaagtaagaaaaatgctacagaacttattaatattttggatggtgaatttgcaaagtttactcaaaatgagatggttgaaaaacttactgctgctgatatagctcatgaaaaaattcaacatgttaatgatgtagtgactgatgaacaggctattgctaataactatatatatgagcatacaagtaaaaatggaaataagacaatgcttgcatccactccagttaaatttggaaatattgaagttaacatgacttgtgatgctccacttataggagaacattcagatgagatattgagagaacttggatacagtgattctgatatagaagctctaattgaatctggaattgtaacaatgaataaagaagcatgtgaaatatgttaataaacatgtgaagtatgttaataaataggagggaattttatggattttagattaacagaagcacaattaatgcttcaaagagtagcaaaagaatttgcagagaatgaaatagcaccaatagctgctgaaacagataaaacaggtatttttccaagggagctttttagcaaaatggctaaaataggatttaatggcattggaacacctgtagagtatagtggttctggagggacagatatagaaaaggtaattgttgttactgagattgccaaaaaatgtgcagcatctgcagcaatattatcaatacacacaatatatgctcaagctattttgaaatttggtactgaggaacaaaagaaaaaataccttccaatgatggctgaaggtgggtgtgtaggtgctttcgccttaactgaacctaatgctggttcagatgctgcaagagctgcaacaactgcaattattgatgaagaaacggatgaatatgttttaaatggaactaagtgttttatttctggtggaggtcaagcagaatcattaataatatttgcactgacagacccatcaaagggaataaagggaatgtctgctatcattgtcgacaaaggtactccaggtttttcaataggaaaaattgaagaaaaaatgggtattcatggttcagaaactgcagagttaatatttgataactgtagagttccaaagtctaacttattaggaaaagaaggcaaaggatttaatatagctatgacttgtttagatggagcaagaattggaattggagctcaagctgtaggaattgctgaaggggctttagaagaaagtatcaaatattctaaagaaagagtccagtttggcaagccaatttcagcgttgcaaggtattcaatggtatatagcagatatggcgacaatggtggaatcagcaaaattattagtatattatgctgcagatttgaaagctagaggagaaaaacacactaaagaagctgctatggcaaaatacaatgcgtcaagtactgcaagagaggttacaaatctagcccttcaaatccatggtggatatggatatatgaaggattatccattagagagaatgtacagagatgccaaaataacagaaatttacgaaggtacttcagaaatacacaaagttgttatttcaagagcagtactaggataggaggaaaagaatgaatatagttgtttgcttaaagcaagttccagatactaatgaagttaaaataaataaagagacaggtactctaataagagatggtgtaccaagtataatcaatccagatgatagaaatgctttagaagaagctctaaaaatgaaagatgaactaggagcagtgattaaggttataagcatgggacctcctcaagctaaaagtgctttaaaagaagctttggcaatgggagctgatgaagcttatttaatctcagatagagcttttggtggttcagatacttgggctacatctacaattattgctgctgctatagaaaaggttggaaagtatgatgtaatattctgcggaagacaagctatagatggagatacagctcaggttggaccagaggttgcagaatttttagggataccacaagttacttatgcaaaagaagtaaaggttcaagatgacaaattactagtaactcgttatacagagacaggggattatttaatagaagcaaagatgccagttttattaactgctataaaagagttaaacaatccaagatatccaagtgtaaaaggaatcttagaagcttataataatggagatgcgaagattactgtattaacacttgcagatttagatgttgatacaactcaaattggattaaagggttcacctacaaatgtttataagtcttttgcaccagttaaagacaagcataatgaaataatagaaggtataaataaaaaagaaaaagctgagaaactaatagaaatactattcgatttgaaactagtataggagtgttaagatgatgagagcaaaagttaatcaaggtataaatttaaatgattataatggtgtttgggtaataggggagcaaagggaaggcaaaattaatcctgttacgatagaacttattggtgaaggaagaaagcttgctgaccaattaggaaaagagcttgaagttgtgatagctggatatgaagtagagaaagaagtgaaggaattacttcactatagtgttgataaagtatattacatcaatgaccctcttcttaaagatttcactactgatggatatgcaatttcaattgcaaatttaatcgaaagaaaaaagccagaggttgtattggttggtgctacttctataggaagagatatagcgcctagaattgcaggtaaggttggaacaggtctaactgctgactgtacaaaacttgaaatagattcaacagataataagttattacaaacaagaccagcatttggtggaaatttaatggccactattgtttgtccaaaaaatagaccacagatgtcaacagttcgtccaggagttatggcaaaagctgtaagaaacgaatcagagactggaattttagaagttgttactccagaacttactgaaaaaatgattagaactagattagtagaggtacttccacaagaaaagaaatctgtaaatctaactgatgctagaataatagtatcaggaggaagaggattaaaaagagcagaaggatttgagcttataaaagaattggctgataaattgggggcagagattggtgcttcaagagcagcagtagattcagggtggatagaacattctcatcaagtgggacaaacaggaactactgttagaccagaactatacattgcatgtggaatatctggagcaatacaacacttagcaggtatgagtgattctaaatatatagttgctataaataaagatgcaaaagcccctatttttagtatatgtgactatggaatagtaggagatttatatgaaattatacctgaaatgatagaatcattaaataggtaacttttagaaaacattgaatatgtagaatgataagtcttataatattgtattgtaagacttattatttttgctgaaggttatagtggggagatgaaacaatgaaagagcagtggtataaggatatatttgcaagaatattatctatgactgatgatggttttattgttgtaaatacaagtggagtaataatagatattaatgataaatattgtgactttttaggaaaagaaagaaaagatataataggacaaaatatacaaagtattataccaaatacaaaaatgctagatgttatgaaagataagtactgtgaagaaggagctatacatcattattcaggtggaaatacaaaagaaaaaagtgtaatagtaagtaggtcttatgtagaaaatgacaatggagaagtagttgcaggagtagctcaagttaaatttagattgcaatcatttgatgtagctaaaaaattaatgtcagaatatatggagctccaatattataaagagcagtttaaggataactgcggttttgacaagctcataggtgaaaatagagacttcatagaacttaagaaaacaggtgtgaaagcttctaaaacaaactttccagtacttttaacgggtgaaacaggcacaggtaaagaagtctttgctagagcaattcacaataatagcagtaggtcagataaacctatggttagtataaactgcgctgcaataccagaagaattattagagtcagagctatttggttatgacgaaggagcttttacaggagcaaaaaagggtggtaaaaaaggtaagtttttagttgcaaataatggtacaatctttttagacgagataggtgacatgcctttgaccatgcaagcaaaacttttaagggttcttcaggaaagtgagatagaaccagtgggaggtcttaaaactataaagatagatgtaagagtaatctctgccacaagaaagaatttaagtaaaatggttgaagagggattatttagagaagacctatactatagattaaatgtaataaacattcatatgatggaattgaaggacaggcaagatgatattttattgctagcaaattatatattaaacaaattaaatgttgaatacaaggaattgaaggttttaagtgataaggttaaaaattgttttattaactatacttggccgggaaatataagagaactacaaaatgtaataaaaagtgcctatgctgtaagtgatgatatggtcattatgatgtgtgaccttccatctaagatggataatatcagcagagtagctcaatgtaatgtggatagcaattgttcaattcatgaaatggttgagaattatgaaaaaagcttaattattgatgtgttaaggaagtataattggaaatgttctaaggcagcagaggttatgggaatacacaagagtcttttatataagaaaataaaaaagtatgaaattgaattaaataattaagataacttgaattaaggcaatgctaaaaaaagcgcccttattcaaagcgaactgtataaactgttttatgcagttaaaacgtgtaaaagtagatgtgaagtactaatgtcaatcattagtactttttattgtatttataattactatctatatttcagtatcttttgatatctaagattattatgtttaatttaggatataacaaaaccctcttagttattgacagttttttatattttaactgtctactaagaggggatagtttagtttaaatttagagtaaattttatctagcatttataaaaaatattttgaatagcttttttgttatttagtcataattttctacttctttatcaagttctttgccacaagaatcacacttatatatagcattgtatccataatcatattcatcaactattttcttttgtctaaatacaccaccacactcacataggaaaccaatttttataagtgtaacgataaattgtgattttataaattttatatcattacatttatcgttagtgtaaaatgtataaatataagagttatcgcactcatctcttaattcaaatctttcaatatatgtgttattttttaattcctcaaattcttctttagttaaatatgatttttgttgcaattcatgtaaacgcttaatttggtccattatttatatcctcccaataattttagtattttaagcttagataaggaatctaagttttattaaatttatcccaaggaattatttaaatcatatttagttttattaattacaacatatataaattacacgaaaataaaactaattgtaaaaataatatcctgtgaaaacctaaactactaaccccttactaacccgaaaactaaaaaaagaaaatatatccaaatataagtgatatataaataaagatgttttatataaatttaactttaaatattctgacaataatatatataaatatattatagttaaaatataccacatattttgggcattgtatactggaattagagtaattaatttattttttaacatacaaatgattttatgaaaaaaaacaagactcaaaaatttttatattctttgatagaataaaattgagagtaaatttattgaattttataaaatttataaggggtgagtctaagatatgcatgaagataaaaatgatatatttgaatcaatagatactgaggattttgataataaaacagaagaagaatgtttagagctagtaagaaaaaatggattgaatttaatatacataaaaaatcaaacagaagagatatgtctagaggctgttagacaaaattgtaatgcaataaaatgtgttcagaatcagacagaaaaaatatgtatagaagcagttaaacaagattggagaatgttagaatttgtggaagagtcaacagaagaaatttgcatgttggctattaaccaagatggaacagcattaaaatatatagaaaatcagacagaggagttatgcttaagagccgttgaaaaaaatggtgcggctttggagtatgtaaaagaacaaacagaagaaatatgtatagaagcagttagaaacagcgaatttggattggcaagagtgaaaaatcaaacagaaaaaatatgtatggaagcagttaagcattgtagctataatctaaaatgggtagaaaatcaaacagaagaaatatgtatggaagcagtgagacaaaatgggcttgatttgaaatttgtaaaaaatcaaacagaaacaatctgtttaagagcagtaagacaaaatggaatggcattagaatttgtaaaggaacagactgttggtatatgcttaaaggcagtaagacaatatggaatggcattaaaatttgtaaaagaacaaacagaagaaatttgtacagaagctataaaacaagataaaagagcacttagttttgtaaaaggagataaggaaaaatacaaggctctatatgataataatgaaccatttgcaaagagatatgttagaaatgtaatagaaaaagaaaacagagcattgattaaaaaaggagaagaaaatgcaaaaatcaaaattgcaggaaaactttatgatagaggcatgtcttttgaagatatatcagatatagttgagattgaaataagcaagttaaaagtgagtttaggtgttttttaaagtaataaatgtaggtgttttttatgggaaatagttaataaaaaaataatcgactagctctttgtaggacagcaaaattagtgatataatttgatgtataataaattatttttattagataagggggaattaaagttgaagattacagtattataccaaacaagaagtggaaacacagaaagggtcgctaagctgatagaagatggagctaaaaaggtggatggagtagatgtaaagcttatgagacttgataatattgatttagattatttaaatgaaagtaaagcagtaatatttggaacacctacttatttagcaaatacaacttgggaagtaaaaaaatggtttgatgaagattcaaaaaaagttaatttagctggaaaattaggagctgtttttgctacatgtgattatatatgtggaggtccagatgttgcgatacttactatagtaggacatttgatggttaaagggatgcttgtgtattctggaggtggttctttaggaaagccatttatacatttaggacatgtacattcaattgaaggtccagagttacaagatgagaaggctataatatttggtgaaagaattgctactaaggcaaaagaactatttgcttaatttctatatgcataataatgattagagtaaatttagggttttaatggagatttgaagtaaaagttataaaataaaaaattttccataaaattactcaagatgaattataatataattataaataaattatattattaaaatatttaaaatcaaacgtcaatagcgagggaagtttatggtatggcatatagaatatgagattttttctgcaattatagttatttttttaatggtatacttttttagaagtaaatttatacctactttacaaaacaaaatatattgtgcacttttaatattctcatttttatttatactttcaaatattttaggttcattttgtctaaataatatagacaaaattccaatttttattacttttttattgaatcagatatacttattgttattgccaataccagcagctcttgtatcattttatgttatggctattatttatcaagatataaggtatatgaaaaaaagattattatttttatctataccacttataatttgtataatcttatctattacaaatccttttacgcatattctatttggattgtcaaaagaaacaggttatatacggggttgtggatatgttgcaacttttgcatcttttttcttttatgcaatatattcagcatttttatcttttaaatatagaaaagcaatgcatgaatcaaaaatatgggctattagaggttttcttatagtttcaattgtggcaattatcttacaggcaatttttttacagtatcttcttacaggaactgcatgtgcatgtagtttacttttgacatatctttctatgcagaatcgaggtcttattattgatgaccttactggtgtactcaatagacaatcttttattcaagagctagatttgaatatcaatactgaacaatcaggatttattattacaattgcgcttgatgattttaagtttatgaatgaaacttttggaacaaaaaatggagatattgcactaaaagaagttggaaaatatttgattcagatacatgatgtaaaccatgtatatagaatagggggagatatattttctattgttgtcaatagtcaattaggtatagaaccagatgatattatcagaaagatagaagaaagatttaaaaagccttggctagtagaagagataagttttaatttagcaactagtattgctgttgtttattacccagaaaatgcagaaacgacagaagatgtaattgttgctatagatttctctatacatgaagcaaaacgttctgagtcaaggcgagttgtttatgcagatgcgtctataagtgaaaagataaagaagaaacatgttattaaaaattgtttaaaagaagcattaaaaaatgatgggtttgaagtgtactaccaacctatattttctaatagcaggggcaggtttacttcagcagaggcattacttaggctagaacacaaagagttaggttttatacctcctgatgaatttattccaattgcagaacaaacaggattgattaactcaattggattagtagtctttgagaaggtatgtagatttatagctagtgatgagtttgaaaatttaaaattggataatatagctgtgaatctttctgtagtacaatgtatgcaaaaaaacttagctgatgatttactttatcttatgaataaatataatgtatcaccaactaaatttaaacttgaaattactgagactgtggctatgggctcttttaatataattaaagaaacaatggaaagattaattgatttaggtgttaagtttgcacttgatgattttggaattgcttattctggagttactaatatgctttctttaccattttcagtaattaagttagataagagtttgatttggtctatgaatgaagatagtaggcataagcttacagttgagacgattatagctcttataaataaattgaatatgaaggctgtagcagaaggtgttgaaaccattaagtgtgctgaagatttaatagctatggagtgtgaatatttgcaagggtattatttttctaaaccagttccagaagatgtttttaaaaatttgttgaaagaaaatacttttacaagttaacaccctttatttttttaattacaactttgttcattgacactgccagcgatatattataaaattaacacaataataaatattaaatttattatacatattattaatattaattaatggagtaaagatttattatattttatttaattatcctaaagtgagaaaggaagatgtgacatgaataaaaagaaaatattagtgccaattgatgggacagaaagaagtatgcattctttggaatttataaaaggaatatttaaaaaagatgaagttgaagtagaaataatgaatgtaaaagaactagtatttattgatggcatatccctggctgaagagataaaaaattctgaaaatttaggaagaagaatcttggataaagcagcagagataatgggagagtatgatgttaaagtacattttacttttggatatccaggagatgagataattagaaaagcaaaagaagataatgtagattttatagttatgacaaaatctactaaaaaaggtcttacaagaatgataggttcagtaacagcaagtgtagttaaacaagcaaaatgtatagtgatgattgtaccggagtagaattagaaaggtatttgaaatatgaataaaaagatagtagcagtttgtgaaagtgaaagaagtttaaattctcttaagacagctgcaaatgatttaggatttgatttagtttatgaaattcaagaaaatgataatataaaaaatgaactttctatttatgatatagaagatgcatctatagtgttatttgttacaagtgattctatagaaagcatagagaagattgatagatttatagatagagaattttatgaagttgatccaaagtatataatagaggatgcaaaatctatagtaagtgaaattttaatagacttaaattaatcgtgggtgtcgcactaagaatagagcgacgcctttttacatattttacataagaaataaagggctgtctcaaactatagataagactctttttcattgttgaaatgatgaaaatatatttgatttcatacaaaaaagagtgcctcataactaaaaagttcactttgagacactccatttttatatgttagttgcatttaaggtaaaatagaagtttaatcatgttgaaataactgaattacatcttctaaatgattgtacattgatgtataacctaagtaagagtctttactatcaaatgccatcattatcttgttatggtggctaatcatatccttaagagaatttctatatttaaaaccgaagtattggttagaagaaactgttttaggtattaactcataatattttataaaaattggattatgagaagctaaaattatctctttgtgaaattgtaagtcagcatcataacattcttctatcaaaccatgagaaaccttatccaattcctctattgactttaggtaagtatattttattttttgaagttctttagatgtagcatttaaaattgctagtttagtagcttcactttcgataagttgtcttgctcttaaagattctacataaaattcttgtatgttatgatttttatagatttcaccatcatcaaataggtcaacttttttaaatccttcaactataggacttgagtaaggcacagctctaagtattccttccttacagagtatatttatggcatttcttacaggtattctacttatgttaaataggtcagcaatctttctctcacttggtaatttactattaattttaaaagttccatttagaatgtttaatttaatataatcaataattttttcagtggcatttaagcttttcataaaaactcctaaacatataatttttttatgattgtattatatcatagttaagagttaaatctacttttttataatatgtataagacaggatagaggccaaaatagctataatagccaagataaagtatccatattgtattgaagtatattccgatattttaccaactatcattggaaatacagacattcctatagcataaattgcttgaaaaaaacccattgcagtagatttctgatgttttggtacatttttcatagactcgctagtaaggtaagaaaggagtatacctgtagatatacctggtagcacttgtagtacaaatattatattaatattttttattgttggaactaaaaagcaataggctgaaactaaaataaaaactaaaggaatccaaaattttggcccatacttagtacaaaatttagtagaagcaaagccagaagaagcaacagcacacaccatgtaagatatagaagatagacctatgagggtagaactagaacctaagtttttaagaatttgagtagtaaatgacattgttgtagacatttgaataccctgttgaattaatgccataaaggaaaaaaatacaagtcttttatctttgcagatagataaatattttttaattgatattttttcaggtattttttttgaattatgattttttatatttaaggctagaatcgttccaataactgaagacaatacactcatgatacataaggctgtcattcctaatttttcataaaataaagtactcataacaaatccaatcaacattcctagattgtttaccaatattatcgtactcgtagctttttgttgatgttctgtagaaaaaaagttggtatagtgaaccatgtaagaaatccaagttgatgatgatattccagataaaatgttagctataagaaaaccattgcctccaggagaaaagactcttataagagatgctaaaccagcaaagaaaattccagacagtataaatattttatgtttatttatagaatcagcaaatactccaacaggaatccttaataaacattgtgagattccatatgcacctattattataccaatcatatttgtagatacattacatgcacttaaatatggattttggaaaggtatatatacatattgtgaaaaccagaaaaatgtaacaatagaaagtaaaagtaatttttgattagatatttttttcatattatcctccatatggtatttttataatgcaaataatataccatttagattttttaatcaagtactttctctattaaaaaaaatttaaatatataattattatttacaaaaaaattatactttatagttgaattaagaaaacgcttatgatactataaagttaacaaatttgaatatataacagtagacgtgttactggtaatgcaggcaagatcgaatcaatttttatagattatctatagagtactatgggtataatctatttatttggttcgatttttttgtttaattggccataaaacaaaaagcctatagttgaaaatggaggattttttatggattataaaaatatagctcaagaaattctactaaatgtaggaggaaaagagaatgtaaatgaagtgactcattgtatgacaagacttagatttaaagtcaaaagcgcttctaaagtgaataaggataaattatctaaaactgaaggagtaataactgttgttgagagtatgggtcaaatacaagttgtaattggaaataaagtaaaaacagtatatgatgaggttataaaaattgtacctcaatcaaatgacgtaggtaaaaagaatgaaagtcaagaaaagcaaagtataattaattctatattatcagcagtagctggtatatttacacctacaatacctgctatagcaggggttggtatgattaaaggtattttatcagttcttgctatgtattatatgaataaaaatggagtagatataaaagaaacgcaaagttatattatcttaaatgccatggccgattctatattctattttatgcctattatactaggatatactgcggctaaagtatttaatgcaaataaaataatatctatggtattaggagctacactttgttatccaacttttactgctttgatggcaggtgaagaatctgttagatttttaggattggcagtaacaaaagctacgtatacatcatctgttattccaataattattgctatatgggctctttcatacgttgaaaaagtattagaaaagtatatacctgaggtaattaaaataataatggttccaactttatcattggttgtaatgttacctgcaacattatttttatttggaccaatcggaatttatataggaaatgtcataaacttttcttataagtatatttatgaattaagcccagcgttgtgtggagcatttgtaggtgggttatggtgtgtgttggttatatttggtgctcatagagcattattaccaataggtataagtgatgttgctcaaacaggaagacagaatttattggcatttgcaggagctgcaaacttttcacaagcaggggctgctctaggagtattctttaaaactaaaaatcaaggactaaaaacaatttctatgtctgcaactataacagctttatttggtataactgaacctgcaatatacggtgccaatcttagattaaaaaaacctatggtatgtgccgtaatatgtggtgcatttggaggtgcgataatgggaatgggtggagcttatggtaatgcatttgcaaaccaaggtgttttaactatacctgtatatgctgaagcaggtgcattaggtttcttaagttatctaggtggttgtgctatagcattttttggttcagctatttcaacttatctagttggatttgaagatttggaagagtcttctaataaggaaaattcatttataaaagtagaaacgaaggatggtgttattgatataacttcacctgtagagggcgaatgtatagaattgtcagaagtaaaggatgatgtatttgcttcaaaagctatgggagaaggtatagctgtgttacctacaaaaggagtaataacagcccctactgattgtgaagtagcttctttatttccaacattacatgcaataggattaaaattagataatggagcagaaatgttaatacatgttggaatcaatacagtagagttaaatggtaaatactttacaaaacatgttaatcaaggagatttagtgaaaaaaggtgataaacttatatcgtttgatatagataaaataaaaaaggctggttatgatgtaactacgccagttatagtaaacaatacatttgattttgggcaagtagtttcttgtaaatctagttatgtttcaaccaatgataatataatttcattagtattagctggtaattaagttaatttgactagagataagtaaattgatttaaaaggaaataagtaaatcaacaattaaatacatctaaaagtaagtttattgcaatgaattgttaaagaaaataattaatatggagtaaagctattgcaatgaagtaacaaagaaaataattaatatagagtaagtttattgtaatgaattgttaaagaaaataattaatatagggtaaatctatctcaatgaaataacaaagaaaagagttaatatagagtgaacttattgcaatgaatcaacaaaaaaaataatcaatataaaaaggagaaatatttatgaatacaggatttccaaaagactttttatggggagcatcatcttctgcatttcaagtggaaggagcttgggataaagacaataaaggaaaaaccgtagccgactataattcttttaaaaagtctcatttacaggcagatactaaagttgcatcagacttttaccataattatgaagaagatattgaattaatgaaagaattagggatgaaaacatatcgtttttcaatttcatgggcaaggataataccagatggtgaaggagagataaaccagaaaggtttagacttttataataagataatagacaaactaatagagtgtgatattgagccattcgtaactttataccattttgaccttccatttaaattagtagagaaatataatggttgggaaagtagagaaactgtctatgcttttgaaagatttgctaaaatatgctttaagcattttggagatagggtaaagtattggcaacctcataatgaacagaatttaattgttagagtggaggagagaattaatatatatgatgaaacagattcatggaagatagataaaatgcgtgctcagatggattataatctttgcttagcacatgcattagcagtcaatgcatgtcatgagatgataaaagaaagtaaaattggagcagcagtatcatcatctgtaacatatcctcttacttctaagccagaagatgtatatgcagctagaatgaatgataattttaaagtgtactatatgcttgatatgcatcattatggagaatatccagggtattatatgaagtatcttgaaaaaagaaatacagttcctcacatggaagatggggataaagagatacttaaaaaagctaaaatggattttatagctgtaaattattataggacaaattgtgcagaagctttacctgaagattcacaacatccatttggattaagagaaggaactgttgattttagtatgtatggactatttaaaatgtcaatgaatcctaacttagaggcttctgagtatggagcagcaatagacccatcaggtcttagagttgccttaaatgaatattggcaaagatatcacttacctgttataataacagaaaatggtctaggagctaaagatatattagaagatggaaaaattcatgatgactatcgtatagactatttaagaagtcatataaatgcatgtaaactagctattgaagatggtgtagagatgattggatattgtccatggtcatttacagaccttttaagttcttctcaaggttttaataagcgttatggacttgtttatataaatagaactgaccatgaagttttagatttaaaaagaatcaagaaagatagtttttactggtataaagaagttatagagaacaatggaatagtaaaataaacataaatatatattgagggttttagtatgtacattacaaaggtattaaataattcgttgctacttgcaaaggatgataatgatgaagaaataatattgatggggaaaggcattggccataattataaggccgggtctgagttaaataaaaaagatatagaaaagatttttgttcttcatgatgaaaatataaaaaagagtattatacaattggcaacagaaatagatgcagaatattttggtatagctcaaatgataattgcatatggaatagaaaaatataacttaaaacttatgaaccatatatatttggccttaactgaccacattgcctttgcagtgagacgctttaaagaaggtataatgattgaaaatcactatttgttcgaaatcaaggaatttaatccaaaagagtatgatataggaaaatatgctattactgtttttaaggaggttcttggtttagacctaccagaagaagagattggtaatatagcaggccattttataaatgcacaacaagataatccttatagtgatagaaataagagaagtgctaaaattgtaaatgctattttgcaaatagttcattatcacttttctattgtatataataaagagtcattttattataggagatttgtaatgcatctaaaggccttttcacaaagatttctggctaatgaaccatcaagagaaaaaatagattttatatatgagcaagttcaaaaaaattgtaaggaagagtatgaatgtgtgaaaaaggtaggagcttatatgtataaggaatactccagagaattaccaagacaagaggagttatatttgatgattcatattcataagattttaggagaattatgcgaaaatagttagaatatcttaatatgctagtaatattataaaaaattaaaaattaactacactttaaatatgaacaattgcattacttaagggggttgtcttaaaattgatttttttaattaaatttgaagctcaactccttttttaaacctttatatcattacaactttaatgtttatacgcctgtactttagatgtatatctactttttacatttctcaacatgcaaacctaccattttttgcagtatgttaattgaaataaaccattgagttaaccctaaatttattctggacttataggaatagttccaaagatactttaaaatattttctggaataattgcttatttcacatatgttttattgtgatgttttgatttaataaattcttcaactctgtatatagtaaatgtattatcatgtttgttttattcaagcacacttataatacgcttgattttttcacaatgatgaaatatactaatgggtgttataggtataagaatcgaattacacttgaagaagtaagtgataaatgagatataaatcctcatatgataaactactatttcattgaggaacatattctaagtgatgtcaagatactacaatatgactaaattcctagtgataaaaaagtctacgaatgagtgtagaaaggggaactaagatgaataaagttttaattatagatgatgataaagatctttgtattttgttaaaaaagagtatttcaattgaacagattgaagcaaactattgccattctgggagagatggactggttgaactttcaaaacaagattatcagttagtagttctagacgtgatgatgccaggtatggatggttttgaaactatggaacaaatacgaaaatatagcagtattcccatcttaatgctgacatcaaaaagcgataattacagcaaagtgcatggattgcgagctggtgcagatgactatctaaccaaaccatttgaaattacagaatttactgctcgtgtactgtctttaatccgacgttacacccgttttaatccaaaaaatgaggaaccacagcaactttctttcaaaggtttgttgattgaccttgaccagcatacagtgactaccaatggcgaacctatgttgcttccacccaaggaatttggtgtgcttctttactgtgcaaggcatcagggtaagattttgacaaaacagcagatttatgaagctgtgtggggtgagccatatgtatatgatgacagcaatatcatggctattatcagtcgcctaagaaaaaaaattgaactagacccatcatctcccatctatttgcaaacaataaaaggaattgggtatcaattcaacacggaggtatgaaaatggatgaacaaacgataattcttttcttattcttgctgtcgattggtctactttttctttccatatttgctttttccaagcttgggcatattcacaaacgcctaaaagatatagaggagatactggctgatgtacaaattggaaacgaaaatcgcaaaatactaattaagccatgtgatgttatggctccattggtttatcagcttaatgagattgtctacgattatgaaaataagttactttctctgaaaaagtcggataaagctagcaaacaacttatgacaagtctatctcatgatgttcgtacaccattaacaactctgattggttatctggatgctgtacacagtggtatagttatcggacaagaacgggaggaataccttgaaatcgctaggcgtagagcctacgacctcaaggattacattgatgttctttttgactggtttcggttgaactctgatgaatttacgctgtcaatagaatctgtggaaattgcagagttgtcacgcaatattttgaaagactggattcctatattccatgaaaagaaactgaattttgaaattgatattccagaaaatcgactaatggtaaatctcgacccagatggatattcccgtgtggttaataatctggttcaaaatgttcttgctcacagtaaggctcggcaaatcaagattaccatgagtgaggattccagaatggtattactccgtgttgatgatgatggtgttgggattgccagagaaaatttaccacatatttttgagcgactgtataagtgtgataaaggacgttcagaaaaaggaagtggtcttggtctatctattgtcagtcaaatggtggagcgaatgggtggtcagatttccgtagaaagtgagattggaaagtataccgtatttacagtgagcttaccattaatataaaattgtttttcccccatgtgacatgtatacacagggggattttttgtaagttataaagttgcaaggttaatacaaggttgttgcaaggttaatgtaagattgaggtggtatgatagctttaataaacaaaggaggattttattatttatgaataatttaattattgaaacaaaaaatctcactaagcaatatggtgctcaaaagagcgtttctaatttgaatattcacgttcagaaaggtcgcatttacggattgctaggaagaaacggtgcgggtaagacgacaactatgaaaatgttattgggtctaacaaaaccaactactggagaaattaaaatatttggtcaggacattcacaataacgagaagaagcttcttcctcgaattggatgtttgattgaatcaccagggttttatcctaatctgacaggaacagaaaatctcaaaatctttgcaaggcttagaggaataccaaaaaaaaatgcagtagaatcagcactggatgtagtcggtttgccaaacaatgacaaaaagttattttctcaatactctcttggtatgaaacagaggttggcgattgctcttgccattatgcatgacccacaactgttgattttggacgagcctatcaatggacttgatcctattggtattgcagaagtaagaaagtttattcgtgatctctgcacagaacgaggtaaaactattttgatttccagtcacattctttctgaaattgccttgttggcagatgacattggtattattgaccatggtattttgttggaggaagaaagtcttgcccaattagaagaaaaaaacagtaaatacatacattttgctgtatctgatgcagcacatgcagcaaggcttctggaaacccaacttaacctgaaaaatttcaaagtagcagataattacaatattatgctatatgatacagatgtttctgttgcagaaataaatcgtgctttcattctaaacaacattgaggtatcagaatctcatttatgcgaagatactcttgaagattacttcaagaaagtaacagggggtgaaggaattgcttgatataatttcatgtgaattttcaaaactcaagcggttaaaatttatactgatttctattttaggtgcttgcttatttccaattcccgcaacaattttgattgcaaaggacaacttgccctttgagcaattgttcaaattagttgtcaattttggatattttttgctattaccaattgtattaagtattgttgctagccaactattttttatagaaagagataacgatgtattaaaaaatcttgcaacagtgccagtgccaaaaggaaaactggctctggcaaaattggctgtgttgctgtttatatcattgttctactccgttgcagggttaggagctactatcattggaggtttcattgttggaatagtagagggggttactgtaaaattaggaatgagcattgcttttggaattatgttttttgttactgtacttcctgttgtggtactcattgtatatttcaatcgcagctatattttttctattatactttcttttgtatatgctattttcaattttagtatatccttaaatattatcaattttgaaccaaataacccactattaagcgtattacctgctcctgttataatgcgttggtggatggcattttggggagatcccactggcgaatacacggcacttagacagccatatttgctctcaactcctgcttgtgtaggtattttatgtttgataaccattatagcagtcctgctgatttgtatgatatacaaaaagcaggagaattaggaggtatctatgcttgatataattactacagaatttcaaaaaataaaaagatataatattctatggattggtgttgttgctgttctgttttcagcactattggcagtttttcaggttgtaagttcacacggcagtgaccctctaacgtatgagagctttgcaaacggagttatctggaataatttcagtcttagttttccatttgggattacacttattggaggatatcttattaaccgtgaatatacagaccaaaccttaaaaaacatcctaactgttcctatttcattacgcaaattgctagtgggaaaattaattgcggttggaggaattgctgtattgttaagtcttttcagcttcttatgcacatttattttggggttgttattttgcaatatcaatatatctgttacactcattgtaaaatccttagttcagattttgtctgttaatctgtattgttatgttgctgttttgccgattattgcttattttggtcgtaaacaaaatgcatttctgacgggtgtagggattgcatttgtatacgggttttgtggtgtgtttgttgctggaagaaatctgacagacttttatccaatcacagcaggtcttggtctagttggatacaacaatggtgctggtactgtttatcagccacttatcggtgctatgactttgattgtaattctaatcttgacaactattctacttgtatttacacctaattatgataaagttatgaccatatctaagaaaaaagggataaagcataaaaagtattctcataaataacataaatattgtttctattatttaagttgctagacagtgaaaagaaaaaatctgtcgtacagtggctatatgctcatgtattcaagaagctacagttttgatttttcataactgtagcttctttttgtatttattaaatcacggctatcataatacttgcaataggtatagcgacaagagagagtactgtcatgtgtgttttatatattacattaagtatattctaaaatatatgttttaaataatatatttgaaaataggaatatttaaataaaaaaaataatattatatatagttgacaaaaattggcaaatgatataatatataaatatagaaatagtaatcattactattattaaaaagggaggaattaattatgaacttaaaaggaactaaaacagaaaagaatttaatggcaggatttgcaggagagtcagaagcaagaaataaatatacatactacgcttcaaaagcaagaaaagaaggttataatcaaatagctgctatatttgaagaaactgctaacaatgaaaaggaacatgctaaattatggtttaaacttttacatgatggtatgccttcaacagaggaaaatttaaaggatgcagcagcaggtgaaaactatgaatggactgatatgtatgcaaaatttgctaaagaagctagagaagaaggatttgacaagatagcttatttatttgaagctgttggaaaaatagagaaagagcatgaagaaagatacttaaagcttttagaaaacttaaatgaaggaaaaatatttaaaagagatgaagaagttgtttggcaatgtcaaaactgtggtcatgtgtatgtaggtactgaagcaccagaaaaatgcccagtatgtgaccatccaaaagcgtatttcaatataaaagctgaaaattattaaaaattatcattattaaaaaggaatgttaactatgaaattttctaaacaacgagaactgattttaaatgaaatattaaataatccggttcatcctactgcggattacctatatgaaaacttaaaaaaagataatccaaatttaagcttaggaactgtttatagaaatttagctcagctaacggaacatggctttataagaaaggttagtattccagggtatccagatagatttgatggtcgaatagataatcactatcatatcatatgtgaagtatgtggagaggtatacgatttagaatccgaagttcttaataatttacaagaattaatatctgaggagacagacataaaaataacatcttataacataagttttaaagggatttgtaataattgtaaaaggtgtagccaagtaggttagttttcaaattctaaaaataattaatgaggtgagtttatgtgtagtgaacaaaaattttttatatgtgagacttgtggaaaccttgtaggaatgatacaaagtggtggtgtacctattttctgttgtggaaaacctatgaaggaacttgttcctaatacaacagatgcagcagttgaaaaacatgtacctgtaattgaagtggatggaaataatgttactgttaaagtaagtagcacaactcatccaatgactaaagaacatcatatagcatgggtgtatcttatgactgaacaaggtagtcaacgcaaatgtctagcagtagatggagaacctgtagttaaatttgctttgaatgatgatgataaagtgatttctgcctatgcttactgtaatttacatggattatggaaggctgaactgtaatatttaaataaattgagtcaaagaggaggctataaatgtattttcatacaaatagcctcctataaatttatataaattcaagttttaattttgtttaatgtcaatataatataaggagaaaataatatgtcaatttataaatgtagtgtttgtggatatatttatgatgaatctaagaatgataaaacatgggatgaattaagtgaagattgggaatgccctgtatgtacaaaaggtcgtagttattttggaaagataagcactgtttactatgaagaagatgaaaagatagcagaagacatagttgaaaatgaatctaaattaaatactgaaaaagagggagatttaaattacttaagtacatatttaagaagagatgatgaagttgagaaacatatggatataattcacgaaatggctgttacaggaaaatctataatagaacctatgagaactaaactaccagtaatttcttgggatgatattttaattatgggtgctcaattaaatccattacctttaaatgagcatgatgaagtaaatacaacaacaataataggaaaaaaagcaaagaaacctatgattatagaaaatccagtttatatttcccacatgtcatttggagctttgtctaaagaactaaaaatagctttagcaaagggtgcagcccaaaataagacagctatgtgtagtggtgaaggaggtatattaccagaagagaaggaagcttcatacaagtatatttttgagtatgtaccaaataaatatagtgtaactgaagaaaatcttaaaaattctgatgctatagagataaaaattggtcaaggaacaaaacctggtatgggaggtcatcttcctggcgaaaaagtaactgaagaaatagcaaaagtaagaaataagcctgtaggtcaagatgtaataagtccatcttgttttgaggaaatacaatccaaagaggatttaaagaaacttatagatgaacttagagaagtttcagaagggcgtccaataggtgttaaaatttcagcaggtcatattgaaaaagatatggaatttatagcttatgctaaacctgattttgtaactattgatggtcgtggtggagctactggagcaagtccaaagttgcttaaagatgcaacttcaattccaacaatatttgctctttatcgtgctagaaaatacatagatacacatggattagatatagatttggttataacaggtgggcttcgtatatctactgattttgctaaggcaattgctatgggggctgatgcagttgctattgcaagttctgctcttatggcagcggcgtgtcaacaatatcgtatatgtggttctggtaagtgtcctgtaggagtagctactcaggatgaggaattgagaaaaagattacatatagaaaatagtgctaatagagtggcaaactttttaaatgtaagtttagaagaacttaagacttttgctagaatttctggtcataaagatatacatgatttaagtgttgatgatttatatactgttaactctgaaatatcaaattatacaaacatacagcatgtatagattgaagtttgaaactattagattttagatagctataaaagtaaatgataaatatattttataaaagagagtgtcttaaaatgaactttttagttcataagtcactcttttttgtatgaagccaaatatatttatcattttagcaatgaaaaagaatcttatctctttattttgagatagactccttctatttatgaaaattaaagatattaaattgtaaaatattctgtgatgtcgtactattaaactaaagattctgtactttaaagtaaataaaaatttaaggagtgcttattatggaaagattgaagatacaagttttagttgacaataatacttatattgatagatactttgttggagaaccagcagtaagctattatattgagattgatggaaataggattttgtttgattcgggatattcagatgtattcatatcaaacgctgaaaaattaaatatagatttaggaaatttaactcatgttgttttttctcatggacataatgaccatacaagaggtatccagtttttagaaaataggtatgatttatctacagttgaacttatttcacatcctaactgttttatacctagaaaacatggagagaaaagcataggagctccattttctgctgaggaaattaaaaatatttttatgtataatcctaaggataagccatttaatctaagtaagaattgtgtgtttttaggtgaaataccttctataaataattttgaaaaaagagctaaaattggtaaatgtaaaataggagatttgtgggaagatgattatgttttagatgattctgctatagtttgtaaaactgataaaggtatttttattgttacaggatgttctcatagtggaatttgtaatatagtagagtatgctaaaagggtatgtggagatgatagagttattggtatactaggtggttttcatctttttgaattgaataataggttagatagtacaatacaatatttggataaagaagaaataagaatgttgtacccttgtcactgtgtttcttttaaggtaaaagctaagatgaatgaaatattgaatataaatgaagttggagtagggctgaccataagtatatagtatttgaaagtatataagatttaagttgaaggttaaaaagatattttctatataaagtatcttttttgttacgtttattttaagagaaatcaatatacttttatatgaaatattgtaaaaaaatttatttttaatgagaatatattttcattaataaacaattttattatgtattaataatgctagaataaatataaataaatcaaagttacttacattaaagtatattttttcacaaaatatattgatttattcttttaaagtttgataattccaatgaatgtaataaaagaagggattttatactatacaattattattataaaattataaagaaaaaattaaataataataaagaaaaaatgtataatatttaacattaaaaaagatatttcataaaattaaaaaacaaagtgaatttgaatactatttaaaaaataaaaaaatatataaaaaatatttaatacaaaggtagaaataagttgaaaatgtaaagtcattggaaaaatatagttgaatttaatgaacaaaaatgttattgttttatcaatgaagtgttaaaataaaaactttcaatatcattttagggaggatgatttcatgcaaaaaagtgtaaagaaagcaaaagtaacgggatctatgttagccatttttggtgttgcaagcgttctttttagttcacatgcaggaggaggatttgctacagggaatcaagaaactcagtactatgtgcagtatggatggacagcaccacttatggcaattttagcaatgattatacttactgctaccatgagagaagttatcataatgtataataataacaattgtaggaattataaggatttattttgtgagctttggagaccatatccaaaacttgaaataatatgggagatatattactatctaatggttttaatagctgtaagtgctgttatagcaggtgcagcagcagtatttcaaagtataggagtaaattattttgtagctgtatttattattggagttgtacttcttgtctttactatatttggtgctatgcttgtatctaaagcagctacagcaatgacaatagctattctagtatgtactcttactatttttattgttggtataaaagctaaagtaccagaaataactgaaatattatcaaatagaacgagtttcacacctggctatatcaagccaatacttaatacttttatttatgcaggttttcaatcggttgttatacctacacttgcaggatgttcaagaccacttcttaagaactcaaaagaagctactaaggcaatgataatttcatttgttatgaatgcaattgcattaggacttgctgtaactatgctaatgggatggtatagagaaattattgctgctgggcaaacaacactccctactctttatgttgcaggtcaatctggaaatcatactatatacataatttataatgttgcattattcctttgtttaatgtctacaggagtaactactatatttggtcttgtaaatagatttgaagaccataaagcactttctttcctttcttcaagaatgaaaagaagggtatttacagcttgtgcaataatggtagtgtcaatgcttatatcacttacaggattaagtaatattgttaaatatggatatggatattgtggttatcttggtctattcactatagtaattccattccttacactaggacattataagaataagaagtttgcaaaggaaaatccagaagctaaatggccagcggaattaaatgaaaatgtaaattagatgtagtagcaaaaaatattgctaaagagaatactataaataagaatactatagataatatatctgcatgtttattaagattatttgcaaaatctaatattgaacaactataaacaagcaatataaaactaagaataaaagataaaaagagggtgtctcaaaatggacttttagtttataaggcactcttttttatatgaagtcaaatatattttcattattttgacaataaaagagactaatcctactttggatagcctcttttttctttaatataaaatagtataacagcaaagtatagattgatacatgttttctgtagctttctatatattacagtgtttgtgtggcattggtattttaagcaatctataaattataattctataattcttctactaattttagattctatagccgtctctatttcacttaacattcgttcatttttagggtcaataaaagcacatgtatagccttcttcaccagctctaccagttctaccaatacggtggatgtagtcttctggtgtttctggtaaatcgtaattatatatatgacttactccagatatatcaaggccacgagaagctacatctgtagctattaagtattgtatatctaaatttctaaatgatttcattattctttctcgttttgattgagcaatatcactatgaagtttttgacaattatatcctcttatagcaagagcttcttcaagattgtcaacccttctcttagtcctacaaaatattattgccataaaaggattatcttcatctagtaccttacataaggcatctaatttttttctatctgtagtttctactacttcttgttttatattattaagagtgatttcttctttttgaatagaaactacaacaggattttttgtgtatctataagctaatttttttacttgagaatttatagttgcagaaaagcatagtgtttgctttttgtttgaagtctcttttaaaatagcttccacttcgtttttaaatcccataagcaacatttggtctgcttcatctaaaacaaaagtctttaacttactaaggtctattgtttttctatttagatggtctaaaagcctacctggtgtagctataatcatatgaatatttccttttagtttctttatttgagaaccaatatcttttcctccatatgctgcaagaatacttacatctttagattctttaagtttcatagcttcttctgttatttgaatagctagttctcttgtaggagaaagtataagtacttgtatatcatttatatctaatgatatattttcaaatatcggaagtaaaaaagctagtgtttttcctgttccagtttgagcttctgctattacatcttttccttcttttattagtttaatactttctttttgtataggtgtaggtgttgttattcctgatttttttagaatatttattgtattttcactaatccctaagcttttgaaatccattgttatcttacctttcatgaaaaattttcttttttattaaccaattaataatatcatatttgtaagtatttttagtaaattttttaattattatttatatagcttaaaaatatattaagatactttaaaatggaatgtaacttaacttaaattttagtaggaattttataggtttatttttaaaggttttttgaaaataaatctatttaaaaattaaattaaaatgcaagaaaaacataataactttcatttttaagaagttttcacaaaaaagaaaaaatatagtgcaataaatgatacaaagtaatataatagattacaagatatgaaaagctaaaaaaataaattgcaaatgaaattaaaatgaataaaaaataaaaaaataatcataagttagaggtatcaatgaaaaataagacttaatgtttttaaaattaaaagtatactaaggggggcattaatatgtgcgttatatcaaaagatagagcaaaggaaataaaaatagtagatactactttaagagatggagagcaaacagctggggttgtatttgcaaatagagaaaaaataatgattgctgaaatgttaagtgacctaggtgttgaccaaattgaagttggtatacctactatgggtggagatgaaaaaaatgtaataaagcacatatgtagtagaaatttaaaatcagatataatggcttggaatagagcagtaataaaagatgttgaagaatctatttcttgtggtgttgatgcagtagctatatcaatatcagtatctgacattcatatagaaaataaattgagaacttctagaggctgggttttagaaaatatggctaaaacagttgaatttgcaaagaaaaatggattatatgtttcagtaaatggagaagatgcttcaagagcagatatagacttcttaactgaatttataaatgttggaaaacaagcaggggcagatagatttagatactgtgatacagtaggagttatgaatcctttttctataaagaatgcaatagaaactctttatgaaagaactaattttgatatagaaatgcatacacataatgactttgggatggcaactgcaaatgcacttgcaggaatagcagcaggagcaaattatgttggtgttacagtaaatggattaggtgaaagagcaggaaatgcagcattagaagaagttttaatggcacttaagtgtgtttataaatgtgatttaaataatatagatactagaaaatttagaggaatatgtgagtatgtagcacaggcatcaggaagaatacttcctacatggaaaccagtagttggggataatatgtttatacatgaatctggtatacatgcagatggagctttaaaagacccgcataactatgaaccatttgacccaagtgaagtaaatcttgaaagaaaaatagtaataggtaaacattcaggaagagctgcagttataaataagttgagtgaatatgaaatgtatatttctccagaaaacgctaccaagctattaaatgctataagagctacatctataagattaaaaagaagtttaatggataaagaaattcttcaattatattgtgatatactagcacatgagaaaggcacaacagaagaagaagcagttagaggttcatatatttaagatataattgtttaggaggaaaatatgggagataatatagtttataaaataattaaaaaacatatagtagatggagaagctgttgctggaagttcaattggtataaaaatagaccaaactttaacacaagattctactggaacaatgacatatcttcaactagaagctatgggaatagataaagtaaagactaaaagaagtgtggcatttgtagaccataatatgttacaacaaggatttgaaaatgcagacgaccataagtatatacaaacagtggcagataaatatggagtttatttctctaagccaggaaatggtatttgtcatcaagtatttttagaaagattttcaacaccaggagatacacttttaggttctgatagccacacacctactgctggaggtgtgggcatgatggctattggagctggtggattagatgttgctttagccatggcaggaggagcatactatataaaagcaccaaaagtctgtaaggtgaatctagttggaaaattaaataatatggtatcatcaaaagatataatattagaagtgttaagaaaacaaactgtaaaaggtggagtaggtaaagtttatgaatatggtggagaaggtgtcaaaagcctatctgttccacaaagagctacaataacaaatatgggggctgaacttggagcaactacttcaatcttcccaagtgatgaaaaaacactagaattttttaagagtcaaggaagagaagacgcatggatagagttaaaaccagatgcagatgcagtttatgatgaagagattactataaacttggatgaattaaaaccattagctgcaaaacctcatagcccagacaatgtagatgaagttgaaaatataggcaagattaaaatagaccaagtggcaataggaagttgtacaaattcttcttatgaagacttaatgaaagtagcacaaatcctgaaaggaaataaagtacataaggatgtgagtttggtaatagcaccaggttcaagacaagttatggagatgattgctagaaatggggctttggcagatataataagtgctggagctagaatactagaaaattcttgtggtccatgtattggtatgggtcaatctccaggtactgactctgtgtctttaagaactttcaatagaaatttctatggtagaagtgggactttgtcagcacaagtatatttagtaagtccagaagtggcagcagtaagtgcaatcaagggagtgcttacagacccaagagaatttgatattaaatttacaaatttagatgtaaatgaatttttgatagatgatagcatgataattaaacctgctgatgtaggaagtaatgtagaagtagttagaggacctaatataaaacctttccctcttaatacagagctaagtcagtctataggtggaaaagttatattaaagacagaagataatataactactgaccatataatgccatcaaatgctaagttacttccttttagaagtaatataccgtatcttgcaaactattgtttcaatactgtagatacagaatttcctcagagagcaaaagacaataatggtggatttatagttggtggagataattatggtcaaggttcaagtagagaacatgcagctttagcaccattatatctaggtgttaaaggggtaatagttaagagctttgcaagaatccacaaggctaacttgataaatagtggtataattccaatggagttttgtgatgagaaagattatgaaaatatatctcttttagataatctggagataccaaatattttagacaatctaggtagtggaattttagaagttaagaatacaactaaaggaacttcttttaaggtcaaagtagaattgtcagcaaaagaagttgacgtattaaaagctggtggaaaattaaactacactaaaaatcaagctaattaatatgaaaagagggaatattgaatgtataaagtgacacttataccaggagatggaataggaccagaagttgcgaaagctatgaaaaaggtagtagaagctactggagcagaaatagaatgggaagaagttaatgcaggagaggcagttattgaagagtatggtactccacttcctgaatatattatagatagtataaaaaagaacaaaatagctataaaaggcccaattactactcctgtaggtaaaggatttaggagtgtaaatgtaactttaagacaggcattagatttgtatgtcaatttaagacctattaaaagttttaaggggataaaatcaagatatgaagatgttgatttagtggttgtaagagaaaatacagaagatttatatgctggaatagaacataaaataggtgattatgcagctgaaagtataaagataataacaagaagtgcaagtgaaagaatcgttgattttgcatgtaactatgttaaagataataagagaaaaaaagttacagctatacataaggcaaatataatgaaaatgtctgatggattgtttttagatgtgtttagagaagttgcatcaaaacatggtgtagaatatgatgatttgattgtagatgcagcagctatgaacttagttttaaatccagaaaattatgatgtaatggtaatgccaaatctttatggagatatactatcagatttaggtgctgggcttgttggaggtttaggtataattccaagcgcaaatattggtaaagattgtgcgatatttgaagctgttcatggaagtgctccacaaatagcaggtcaaaataaggctaatccaacagcacttattcaatcatcagtaatgatgcttagatacttaggtgaatatgaaaatgcacaaaaaatagaaacagctttagaaaaagtatttcttgaaggaagtaaattgactgtagatttaggtggctcagcttctactacagagtttgcggatgaggtgtgtaagtatattgtatagattttatttagggaaaaagtgaaatatagattgaaggaaagaggctttctcaaaatagagataagcctttttttattggaatgataaaatatatttgattttatacaaaagagagttcctcataaacgaaaaagttaattttgggatatccattttaattttaaaattaattgattaatacgcaaagaaagattaaacaaatttattatttttaattgaactttcaaccaaaatatggtaaaatttaaaaaagttgaactttcaactaaaaataaatatattgattatgtgaaattctataaaacagaaactatttgactttagtcatggtaggttcagtggaggtgtgtttgattaagactttagatagtaatatattaagagaagtaggtactttatctagagcagtaaattcaataaatgatattaagtacaaggaattaaagttacaaaaaggacaatttacatttttgacaagaatctgtgaaaatcctggtataaatcttgtggaattatcaaatatgttaaaggtagacaaggctacaacaaccaaggctatacaaaaactaataaaggcaggatatgtagataaaaagcaggatgagtttgataaaagaggatataatttaactccaactgataaatctttggaagtttatgagttgataattgaagaagagaatagaagtatagagatatgttttgataattttacagatgaagaaaaacaagtggtaactaagttattagaaaaaatgagcaaaaacgtagaaaatgaatggtttaaagtaaagagatagtaaataaatacattaacttaaggagatatttttatgattagaaaagcgaatatgaatgatttagaaagcattatgaaaattataaaatctacagtggaagaaatgaagacttataataatacacaatgggatgaaaactatccattagaaaaagactttgtttcagatattaagaaacaagatttatatatttatgaagtggatggagaagtagcaggatttatatgtcttaattatgaagagccagaagaatatttaggcttaaattggtcatctaataaaaaagcaatggtaatacatagaatggctgtaaatccaaactttagaaagacaggaatagcatctaagttagttgattttgctgaaaaattagctgtagaaaacaatgtatcatacttaaagagcgatacatattcaataaactcaaaaatgaatttattacttacaaagtgtggttttataaaaatcggagaaatgagttttttaggaaaggagaaatctttctactgttatgataaaatattataaagagcatttataatacaaggggtaaataatagattttcagcattagtaagggcataatataacccagtatatgctattatgaaagggatgatttatatgattggatttctaaagaaaagaagaagtattagaaaatacaaggatgttgaagtagaaaaagaaaaattagataaaatattaaaagctgctcttttagctccatcatcaaaggggcttagaacatgggaatttatagtggtagatgataaagaaaagctaattaatttatctcaatgtagaactaagggtggtggatttttcttaaaaaatgcacctttagctattgtaattattgcagataaagaaaaaaatgatgtttggatagaggatgcaagtatagctgcttcatacatacaacttcaagctcatgaactaggtttaggttcttgttggatacaagtaagaaatagaatgtatgatgataatatagaagctgataagtacattagagaagaattaaaagtacctagcaagtacagtgtagaatgtataatttctataggatattctgatgaagaaaagaaagcatacaatgactctgatttagactataaaaaggttcattttaacaacttttagtatataatatgttgtattaagacattatatttttttctattgttaatatatacttaaaattgtaaaaatatatctgaattttactaacttatctaggggttatgtacaaggattttaaagataaatatagaaattaatgtttataatcgatacataacttgagtaacaaaatttaaggaggttaaagtatgggtatatttaaaacaaaaatggatgaggactggaaagtaaactacattaaagagtttaatgaaatgagagattcttatgagagtaaacttcaaaaaaaacagtttgaggtagatagtttgaaatcagaattggatagactaagaagctataaaaatagccttaagccaaaagaaaaacaaattactgatgatgatataaataatataaagagtttaagaagagatggcttaagctataaagaaatttcaaatcaaacaagttggagcaaagcaactgtaagtagggtattaaatggactttacgattagcatatacatggggtgatttaaattgggatgaagtatagttacaaaaaatgcataatagattctattttattgatgtttataattcaaatattaaggatgattttgaattatgtacttctaagtcaatttgaatttactcttgaaaattttaatattataaacttaatttcttttacattagttggtttatcgttaattttatttttaaaagataattctttgtataacaaggttagaaatagaaaaatcacagaagcttttgaagaaaataaaaacaatatacttattgaaaagtgtaagcttatactttttgttgtggttttatctttagcaataattgtaacttattgtactaagggatatgtactttttaatgtaactatgatgactttgtctgtattgatagttccaatatttgaagagttattttttagagaatatatatggaactatctaagtaattttataaagtcaaagagtaaaattatctgtataacatctatactatctggaatttataatataggatacatagatgttataagaaattatgtaatattgtataacaattcaagctacacctttgaagttattatttcaaaaattatgataggtactgtttttggtattgtacttggattagttaagtataggtttagagatgtagggttttgtatattattgaggagcttatttgctatatttattaggtagatagtataatcggtttataaggttgttttaaatttaattttaaatcaaccttattttatttgtgttttataaaacacttatatattaataactaataaatttaataaagattatttgaatatttttaaaatatataaatatgtattgacatataaatattatgaattacaatttatataaactaataaaaattaaataatattaatcaacttattgaatggaggaataaaaatgaaatttgtgactttttgtagtagcaatgaagaaaaaataggtgtatttaattcagaaacaaatagtatatatgaaattaatagtttaggattaagtaaattatatactgatatgaatgattttattgaaaacgtatctacaggagatttagaaaaaataaaaaacaattcatttgaaaacgcaaagtgttataagttagaagaagttaaattatgttccccaattgtaagacctaaaaaagatattatatgtttaggtctaaactataaagaccatgtcaatgaaatcccagatggagttataaaaaacgtagttatgccagattatccaatttatttttctaagagagcagacaaaataattggagtggatgataagataagcttacatggagatttggtagagaagttggactatgaatcagaacttgcagtaatcataggtaaagaaggtataaatatatcaaaagaagatgcttatgaatatatatttggatatacaatagtaaatgatataagtgaaagagcacttcaagataaacatgttcaatggtttagaggaaaaagcttagacacacatacatctatgggaccttgtatagtacataaagaagaatttgaacatcctttaaaattagatataagtagtgtagtaaatggagaagtaagacaaaattctaatacagagtactttatatttgatatacctactataataaatgatttatcaagaggaatgactctaaagccaggagatataatttcaactggaactccagcaggggttgctatggggatgaatcctcaagtatatttaaagcatggcgatatagttgaatgtaaagtcgaaggaataggagttttaaaaaatatagttgattaatggataaatatgccatataattttattagtacaaataatttaattaatataggattgatcaaacttatgattaatttattatagagagggatgagtatatggcaagagaactagaattaaagtatggctgtaatccaaatcaaaaaccatcaaagatttatatgaagaatggagaacttcctatagaagtattaaatggaaaacctggatatataaattttttagatgcatttaatagttggcaacttgtgaaggaattaaaagaagctacaggtcttccagcagcaacttcatttaaacatgtaagtccagcaggagcagcagtaggggtacctttatcagatactttaaagcaaatatattttgttgatgatttagagctttctccattagcttgtgcttatgcaatggcaagaggagcagatagaatgtcttcttatggtgattttatagcactttcagatgtatgtgataaggagactgcaactattatagcaagagaggtttctgatggtataatagctccaggatatacagatgaagcccttgaaatattaaaaggaaaacgtaaaggcaactataatattgtaaaaatagatgaaaattatactcctgagcctattgaaacaaaggatgtttatggaattacttttgaacaaggtagaaatgaaatattaataaatgaagaactattaaaagatattccaactgcgaataaaatttttacagatagtgcaaaacgtgatttaattatagctcttattacattaaaatatacacaatcaaattctgtttgttatgctaaagatggacaagtaataggggtaggtgcaggtcaacaatcacgtattcattgtactagacttgcaggtaacaaagctgatacttggtatcttcgtcaacatcctaaagtattaaacttaaaatttaaaaaggatataggtcgtccagatagagataacactattgatgtatatctttctgatgattatatggatgtgcttgctgatggcatatggcaaaacttttttgaagaaaaaccagagcctctaactggagaaggaaaaagagcatggcttaaaactttaacaggagtagcacttggttcagatgcatttttcccatttggagataatatagaacgtgcaaaaagaagtggggtaagttttatagcacaaccaggtggttctattcgtgatgataatgttatattaacttgtaataagtataacatagtcatggcatttactaaaaatagattattccatcattaaaatactgaaagtataaagataatatagattaagtaaaaatctacaacaagttttgttgtagatttttttatttgctgtataattttaaatagaactttatttttagatattcaatttggaggttgatatggctttaaatataagaaactatagcctattatgtaatcaaggaacagctaaatttaatgaagatgtagtcggtataaatccatttggggcatgggttttagatggtgctacaggacttaatggaaaaaatttagtgtcaaatgaaagtgacgcaaggtggtatgttcagtggtggaataggtatttatataaaaatataaataaagaagaatcattaaagagtattattaatactggaataatagaagtaaaaaaagagtatgaactaagattaaatgggtttaaggttgaaaaattagatttaccatctagttctatagttgttgtaaaatttcatgaaaataaagtagagtattttttattaggagattgtgctttgtttattaaaaatggagattccaaagttataaaagataggagtatttgtaaatttgataatactgtatttgatgaaatgagtaaactttctaacttggaagagatggcatttgatgagattagaactagtgttatggatacaatagtaagcaatagattgaagaaaaatacgaaagagggctattggatattggattttgatgaggaagctgtggaaaattctatatatggatacattgaaataaaaaaagattttcaattgatgctaacgagtgatggttttacaagtgcatgtgatagatataatctaataaaagaagaagaattgatacgtatagcagaaaaatttggtataggatatatacataataaagtaagggattttgaagataatgactataaagcggttaaagtgccaagatttaaaataaaagatgattcatcttgtttatatttagatatatataatgattagactgtataaaactatttaattttagaaaggaggcaagtgaaaagtgaaaattcttcatataataacacaaaaaccaaatagtacaggtagtggtatatatttgtctggtatgataaaagggttcgaaaaaatcggtcataagcaagctgtaattgcaggtatagatgtaaatgatgatgtaaattgttttccaagtgaagtaagtttttatccagtaaagtataattgtggggagttaaattttcctgttgtaggtatgagtgattctatgccatatgaaagtacaagatataaagatttaaatatagacatgataaatagattgaaatatcaatttaaagtaaatatagataaggctatgaatgattttaaaccagaacttataatatgtcatcatttgtacctcttaactgcatttgttagggaaatagtaaaagatataaaggttatgtctatttgtcatggaacttgtttaagacagttaaataccattgatttagagaaagaatacataatagcaaatataaggaaattagatttaatatttgctcttcatgaaaatcagaaatatgatattataaagacttttggagtaagtgaaagtaaagtagttgtaattggtagtggttataatgatgatatattttataataaaaattataaaataaaggatgataaaataaaaatagtatttgcaggtaagatatgtaaatcaaagggattgattccatttataaaatctatatctaaattaaaatatagtaaagatttaatagaagtcaattttgcaggtactggaagcgatatcgaatcatataatgagatagttaaactggcaagtaagtctccatttaaaatgaatttcctaggaaagttagaacagagagatttagctgagctattcaacaggtcacaaatatttgtgttaccatcattttatgagggattaccagttgtagttttagaagctttatcttgtggcacagatgtaatcactactgatattcttggtgttaaagagtggattggtagtgagattaataattctggaaagatagaatatatttctctaccttttatggagaaagaaggtattccaaaagatgaagagttatatgattttgaaaataatttgtataatgcaatagattctaagatacaatctttattgaataactcaaatgagaaaacatctgtagatatgtcaaaaaaaacgtgggatggcttagcatatagaataaatgaagttattttaatggatgaattgtgtttagtctaaaattatttaaattataaaaaagtgtaactatttttaaactttttttaaatgattttatattatactaatactaaatatatttgttttagggaggtaatttatgaggattagtaaaaaggtattggcgttaggtatttcagcattactgttaagtgttagttttccaacatcaataaacgcactagataagattgaaaatattcaaggagtagataaatatgaaacagctgggcttatttcagataagcaagattttacaacagcagttcttatcaatgcagattctacaatggtagatgggattgctgcaagtggtcttgcaggagtaaataatgcagctattttattaactaataaggatgatataccagaagcaacacttcaaagactgaatagagttactaagatatatgtaataggtggagaaaattctataagtaaagatgtagaaaaaatgttacttatgagaagaatgcaagttataagaattgatggtgtagatagagtagatacaagttataaaattgcaggtgaaatagaaaaaattaaaaacagtgataagatgtttttagtaaatggatttaaggatgaagctgatgcagtaagtgttgcatctgttgcttatagagatggagctcctataatattgacaaaagatataccttcagcagaagaagacacagacttagacccatggtttggagtttctcctgttccagtatatgctattggaggagagtctacattaagtgattacatagtgagcagatatagagcaactagaattggcggtgttgatagatatcaaactaataaaaatgttattgaaaagttctataatggagcaaaagagttctatataacaagtggagacgatttagtttatgctttagttgcatcaccacttgcaaaaaatgctcctgttgttttagtttcaaataaaagtgataagagtatattaagtggagctagtaaagtaacagcaataggtataagtgataagagtattatagagcaatgtttggatgctgtaaagaagtaatggagtgttattagtaaaatgaatatatacattgaaaattagtagattgttcattttataatggtataaaatatatgggaagaggctatcaaatggagataagcctcttttttattgataaaattatgaaaatatactttattttatataaaaaaagtatctcatgaactaaatgtctattttgatatactatctccttttcttatattatatgtattatatgattttttatatggaataaatttcataagtattatcttcctttaatttttctaaccaaatcatctctaaaatatctagttcttctaaatagtctttctctgttttgttatcatcatgttttataagttctaaaacttcaaatgtaaatgctttttcaccatattttttccattcattatttaattcttttatcatacatgagccagcaccaagctgaaatttgagagagttaaatttgctttttatgtcattactttttccaaggtaaatctttttagtaatatcattttttattatgaatacacctgtgtcaaatttcatttctttgtataattgttttaattcacgttttctatccatgattttagatacctctctttataattgatatgtaatatgtaagtttaaaaatatattacatatcaattataaagagattaattttatatgtaaatagtttttataaatttaattatgaattagtcatcaataaacaagaaatttagctgtagaaatccattataaaggctattataaattttaatatgctaaaaatataaaaagaatagttgacagtatagaaaatatggaataaactaaaagtgtaatagtaatacgaaattatatattacattgaaaggtgtgaatgattattatgaataaaaaaatagaattaatagggaattttgcaagtgattggattaggtatagtgattatgaatataaaattactgaagaagatgaattatatatagttccaacagaagatgctgtgtttaccatgtataacccatttgatgtagcagatgatataatagtagatataattcgcataggacaagaggcattacaagatatatcaaaagagacaaaagaaatgaaactaaagaaagaagtacttgaatttgtaaaaaagtatggattattgggtttaatatattcaagtgtatataatagagatatagttggagaagaaagagtactgatgattgaaaagaattatattacaaaagagaatatattgagtacagatgaatatgtaaacatgtttataccatttgcaagtgatgaagatgtgtattttaaaaaatatagaaggggtatagatgtatcaaagagagaagaatctccaaagttttttggaaagagaccattgattttagatttagtattttcaaagttctacactgaacaactagattggattgtaagttttgctaaagatatgtgtaagcattttaatcaaatttgtgtatataaaaatacatctaatctattaactgaaagtgttactattatgtctggagggtttaatcctcaaaagataggattttctataagccaattagataaaccaattattgcatgggagtttgattctttgaaaacagctattgagactatctatgcctttgcaattacaagtgaaccttcttctttaaataaatgcaagtactgtggtaaaatttatattcctacaaattctaaatctcaatactgttcaccttcttgtagaaattgctcaaatgtaaagaaaagtagaagtagagccaaaaaagataaataaaattaataaatatatcattgtttagattttagtaaataactactgaattaaaagttgttatagaaaattatatatctaaatgatggtatttttttgttgagaaaattgaaaagtttaattgagatagtaattttgagttgacaaaaaccacttttaacactactattataagtggttggtaaaataatatacactaatttaaatatagcataaaaaacaaaaaaagtcaatgaaaaaaataaaaaaggagaatttaaaaatgatatcacctattattttgagttctataaatcagaatttaaaggaaatagaaagaaatgaactgcttgaaactaatatagaatctggagattatggtctagctctttctgaatctgatgtaaaagatataataaattcgagagataatactttaaaggggtatggaagaatagaattagatataaaagttacaaaacagttaatagaaaatatatatacatcacaatatacaaatgtggacaattatttagaggctattaatgatatgcaagaaattttttattatttaaaaaatgaaactgatgacaagatatgtgatgatgagattatagaaatactgggtgaattttatgaaaaattttcaggcaatatggacaatgtaagaggagaagcagacgaatttgcaaagaaatttaaatttggagaagtttaatatatgataggagagattttgtatgttaaataatttaagtaatattaatataaacgaaaataatttaataaagaaccaatattccatatctctacttaaggaatgtctaaattgtaaagtgatagatgaaagagaagtatataatatacaacaagaaatatctctaatacttatggatttgattaaaaaatatacaaatggtcaaagcacatcagtaaaaacagaagttgccgaaaaactgttgatttcaatatggtatgctattgatgcatatataaataagcttggagatatagaaaaaagagttgtggagttgactgctaagaatgttaaaaaagtgtaccttggaggcattgaaatattagaggaagagttagttaggctgaaagatttttataaactaatgatgagtagaaaattggatactaattcaatagcatataatgataccttgatggagttatcaagtttctttaaaagttatattgtaaaatttgaagctcaggacgttccagtaagtatagattatccattggcactagatgatatggatgttaagggtatttattatgtgaagaattatattgagagtatagatatagaaaatagattttgtaacctatttaagaaaaaagatagagaaaaattattttatgactatggggtgatttataaaatagattgtgatgttatacttgtaaatttatttgaacttattataaataattgtattttttctactattttaggaaatgaagtgattaatttagaaatttcaaaatatgagtatgaatttttagaaaaacaatttaaaaatatgtacaataatattactgaagataaagttataggctctgaagaaagtaatataattgaattgattgaagtagatgatagttttaacactgaagtagatagtaatttggattataatgattttgaagaaattaacagagaaattagaataaataaaaaaataactttactacttatggaagcaattgaagtattaataaaaagattaagcatagaagatgaagatgtaataagatatattaaaaaatatgaaaagatatttattgaatctgtgctaagctcaataaaaagtaacacttttaaaagtatggtaactgtgagtaaaaataaaaatgaacacttagaagactatattgttgatgatgaaagtaaattggatgatgaatcgtttagagagatattcaatgagatattagatagtacatctataattgaaaaaataagaataataaaggaaaatatcaatgctaaaaaagactttatcgatattcttgaatctgaatgtttatttggagaagagtatttaatgttgtttgcatcattaagtgaattagaattggcaatattgggtagtgtagtattttatgaagatattagaatgagagaaattaatatattagaatttatgttaaatgagaaaactgaaactactttatggaagacagagtacattaaatttatgaagaggcaaagtgaagataagatatactccatagaagagcatatgaataaaattaattaacaaaaaattgtgaataaatagaatgttagtatataatataatctgtaaagcatatcaaaaatacatatatttggaggaaaattatgaaagagtatatcataaataatgttgaagaaataagagaagaattaattgatttatctaagaaaatatgggaaaatccagaattagcctttgaagaaaagtatgcaagtagcattcaaaaagaatacctaaagtcaaaaggatttaaaattgaagaagtagaaaatttacctactggatttatagcaagttttggagagggtaaacctgtgattggcatacttggagaatatgatgctttaccagagctatcacaatgtgtgagtgcagaaagaaagccattggtagaaggaaaagctggacatggatgtgggcataacctgttgggtgtagcaggtgtaggagcagttgtttctataaaaaaattaatagaagaaaataaatttaatggaacaataaaatattttggttgtcctgctgaagaagaaggtggaggaaagacagttatgtgtataaatggctgttttgatgatgtagattgtgcatttacatggcatccttttgatataaatgcaccttggagaggtggaagtctggcaaacttatctgtaaaatttaaatttaaagggataacagcccatgcagctcaagctcctcataatggtagaagcgcacttgatgctgttgaaattatgaatgttggagctaattatttgagagaacatgttattgactctataagaatgcactatgttataactaatggtggtggaagacctaatgtagttcctggatttgctgaaagttggtactttattagaggtaaaaaagcaagggatgcagaacatgttcttgatagattaataaaagtagctcaaggagcagcaatgatgacagaaactgaaatggagtataaggttacagatggaatatatgactatataccaaaccaatgtttgactgatttagtttatgacaatatggtttttgttggttgccctaaaaatactcctgaagaagaagaatttgcaaaaaaattgtgtgatactcttactagagaagaaagattaggtgtagcaacatcattacaaaatgataaatctattgtagaaagttatatacacaaggaaatagttgacggtgacaaagataaaggactagctggttctactgatgttggagatgtaagttatgtaataccagtggctcaatttgcaatggcagcttggcctgttggaattgcaagtcatacatggcagtcatgttcatcagcaggttcaaatataggattttctgctatgataaattcagctaaagtactggcttgtagtgcttatgatgtatttatgaatactaaaattattgatgaagcaaaaattgaatttgataaatcattagatggacaaaaatttaaaccattggtataattttggtaataaaatatttctggggggaatagctatgagagaaaaagttgaaaaagtgcttgaggaaaagataaaaccagtattacaaagagatggtggagatgtagagcttatagatgtaaatgaaaatggtgtggttttagttagactacaaggggcatgtagtgggtgtccaggagcgactatgacaatcaaagctattattgaaaatgttttggtgagtgaagttccaggagtaactcaagtattaggtgtttaatagttagcgtttattaaatgtatgttatacataagtatttaataaagaagtaaaaaaaatagtgaagcaatatatatgaaaaagtatgataaagataataaaacattatagaaataatgaaatatttcatatgtatatgaagaaataagaaaaaatagtgaagcaatatatatatgaaaaagtatgataaagataataaaacatttatagaaataatggaatatttcatatatacatatgaaaaaatagtaaaacaatatatatatgaaaaagtgtgagaaaataataaaatactatagaaacaattaaatattctatataggtattaagaaacatgaaagaaataatggagtattatagataaatatgtaaaagtgtgaaagaaggatgtagataaatttgtcttatacaaatttacctacagtatttcttacacactttttattttactatccaaccataccaataaacatacctataaagtatggaactaaccatatagtccatacaactatactaaacttatgaaagaattttttcttttcctcatcatctttgtataggacaaaagtagcccaacttgcatgaaaaagcataagcacaattgcaagaagacctgtaatactatgaaggttttgtgataaagcagattttacttcaaaagtatggctgttggctatgttactcattgtaaatgttcctaaagtatcaaatataaacccaagccaaaatataattacatgtttcttttttaaaatttttgcctttctttctccaaatacacctatagtgtagaaaattaaagctgatgttataaatactattgcaagtattaatttataattcataattatctctcctttacttttgccaatatatttctaagattttttactaagtcactcaattcgttttcatcacaatttttaaaaatatcatcaaaactttcttgcattttaattttaaaatttgtggcaaattcaaatcctgttgttgtaaacttaacgtatgtatttcttttatcattagatttcttgaatttttctatatatccaatctgttctaatctgctgattatgcctgaaaccgtacctttagctaaagacatttcatcacatagttgtgatattgtaagttcttgattatgagctaccagttttataactataatctgttggtgtgttaatccattttctttaaaattttcttctactgtgtacatagttttagaataaagttcttttaagagcatggctattctaaaacagtcataattacttttcaataaaatcacctcttaaatggtttgcatacaaactaatataatatacttttcttatatagtcaacctaaaattttataattttatagaaaataatgaagaatagaacataaaaattttattttaggtataaataaaataatttgatgaaattttaacaatttttaaaaagtttgtttacacagttaataaatgatgctaaaattaactcatagataaatatagaaaatttaattttgtttaatgataatggaaccacgaaggttttaacgttactttacgtttgcttttatgtggtttttttattgcaacaaaggggggttggggtttgttaaaggatatactgaaaaagttgttgcagtttattttagtaatgtttttattatcttttattgttttttacatggcaagacttgctccaggagacccattaatctcttactatggggatggagtagaaagaatgagtacacaagaaaaagaaaatgctatgaaaaaacttggtttgaatgaaccaatatacagtcaatatataaaatggatttcaaatgcatcaaaaggggaatttggaatttcatttaaatataaacaaaatgttacttctgttataaatgatgtctatataaacactataatattaggtggttcagggtatatacttacctttgtgctagccttattgttaggaatattttgtacattacatgaagataagctcattgatagaatcatatgcaaattaggaacaataaccaactgtattccatcattttgggttgccttagtactcatacttatatttagtataaacttaagtatacttccaagtagtggtgcttattcaatgggagaagagtccagtatattaagtaggatatcacatctaatcttacctcttacagtacttatattaagccatctatggtattacacatatatgataagaaataaattactagaggaaataagagaagattatgtgcttttatgtaaagcaaaaggtttaaataatagaactattgtttttaagcattgcctgagaaatataatgccatcatatattagtataatggccatttcgatacctcatatactaggaggaacttatgtagttgaaaaagttttttcttatcctgggttaggaacactttgttttgaaagtgcaaagtatcatgattataatatgttattagttttatgcttaataacaggggctttagtagtatttgggaatatgttagctcaaattataaacaataaaatagaccctagaatgaaatatgatagaggtgatactaatgaagccacaatatagtgattttgaaattgtaggagaaaattatattttagtagcagaagatgaacatatagaaacaaagaaaaccttatctaaaaaaattaaagaattaccatatatatcaattattattttatcaatcatagtcattggaagtgtattctcatcttttataatgacacatgaaccaacatacatggatttagcaagttctaatttagctccaaataaaacttttttatttggaacagactcaatgggtagagatatatattctatgatatggtatggaggaaaaatatctttatttataggactattttccactgtaatatcaactgttataggaattgtttatggtagtataagtggttcagcatctgaactcgtagatgatgcaatgatgaggtttacagaaatcatacttagtataccttcaatattaattataatatttgtacaagctatacttggaaattcaaatccagtatctatgtccatagtaatagggataacaagttggatgaatatatctaagatagtgagaacagaagttagacaaataagaaatagcgaatacatactagcagctaagagcatgggaggaggattcttctatgtattaaagcaacatttacttccaaattttgtggcatcaataatgttcatggttgtaacaaacataggcgcagctattggtactgaatcgacacttagctttttaggaattggtttaccaatagaaattgtttcttggggaagtatgttatctttgtcagaggaagcattactttcaaatagatggtggattatactgattccgggtatatttttggttaccacattggtgtgtataacaaatataggtaattatataagaaagaataataataaaaaatctagtaatttataaatcagcatttgagtactaaataagcaaatactgaggtatttgaaatatctatttaaataaatggggtcaaagctttgaaaaatattttataaaaagcaaaagggggagcatcatgaaattaaagaagttaaaagttttaagtttagtaatgatacttagtctaatggcaggttgttctagtggaggagacaaagataagaaggcagatacgcctaaagatggaaaggtacttgtttatggaagtaatgactatacaagtataaatcctgcactatatgaacatggagaaataaattcattaatatttaatggattaacagctcatgatgaaaataataaggtggttccttgtctagcaaaggactggaaatttgatgaggcaacaaatacatatacttttaatttaagagatgatgttaagtggcatgatggagagaaatttacggcaaatgatgttaagtttacaatagaaactataatgaatccagataatgcttctgagatagcatcaaattatgaagatataacaaaaattgatgtggttaatgataatactataaaaattactttaaaagctccaaatacagcaatgcttgattatttaacagtaggagtattaccaaaacatgttttggaaggtaaggatatagctactgatgaatttaatcaaaaaccaataggtactggaccatttaaacttgaaaaatgggacaaaggtcaaagtataacacttgttaagaatagtgattattttgtaaaagaaccaggattagataaagtagtctttaagattgttccagatgataaggctaaggcaatgcaattaaaatcaggagaattagacttagctcaaataactcctaaagatatgtctaactttgaaaaagacgaaaagaattttaaagtaaatataatgaaaacagccgactatagaggtatattatacaattttaattctaaattctttaaagataaaaaagctaaaggattaccaaatgctttaagctatgcaatagatagaaaagcaatagttgacagtgtattattaggacatggtgtaccagcatattcacctttacaaatgggaccatataataatcctgatatagaaaagtttgaatataatccagaaaaagctaaacaagaaattgaaaagctaggttggaaattaggttctgatggaatctatgaaaaagaaggtactaagttagctttcgagataacagcaggtgagagtgaccaagttagagttgatatggctaaaatatgtgcacaacagttaaaagaaattggtgttgatgctaaagctgttgttgtaactgaaacagattgggctaatcaagatgctcatttaataggttggggaagtccatttgacccagatgaccatacatataaagtatttggaacagataaaggtgcaaattacagtgcttactctaatcctactatagataaaatacttcaaaaagcaagagaaacagaagataaagatgaaaaattaaagttatataaacaattccaagtagaaatgactaaggatatgccttatacatttattgcttatatagatgcaatatatgttggaaaaccaaacataaaaggattaacacctgatacagttttaggtcatcatggtgtaggtatattctggaacatagctgactggacaattgaataatactgaaattaattagaaaccttagggataaaaatatatccctaaggtttgaatagcataggggttgatggtttttggaacatttattggaggttaataatctatctgtaagttttaaagtagaagaaggagaagttcaggctgtaagaaatgtatcttttaatctaaaaaaaggtgagacattggctatagttggagaatctggttgtgggaaatctgtactgtgtaagagtttgatgaggatactcccatacaatggatatattaaaaatggagaggttttacttaaatcaagtgatttggttaagaagtctgaaaaagagatggaagatataagaggaaagaatatatcaatgatatttcaagaccctatgacatctctcaatccaactatatcaataggaaagcaaattgcagaagctgtaatcattcatcaaggtataagtaaaagtgaagcaaaaaagagagccatagagcttattgaattggttggaattgataatcctgagaaaagatttaaacaatttccacatcatttttcaggtggaatgagacaacgtatagtaatagctatagcacttgcctgtaatccagatgtattgattgctgatgaacctacaactgctttagatgtaactatacaagctcaaataattgatttaataaaggatttacaacataaaataggtttgtcaataatatttataactcatgatttaggagtagttgcaactatagctgatagaatagcagttatgtatgcaggaaagattgtagaaataggaactgtagaggatatattttatgaccctagacatccatatacttgggggttgttgggttcattacctactttagattcacaggatgaatatttatataatatacctggaatgcctccaaatttattgaacccaccaaaaggagatgcttttgcaataagaaataaaaatgcacttaagatagattatgaaaaagagccaccaatgtttaaaattaatgatacacatagtgcagcaacttggttattgcacccagatgcacctgaagtagatgtaccagttagagtaaattgtggaagggtgatttctaatgaatagagaaaaaatactggaaataaaaaacttaaagcaatattttcatttggacaaaagtactactgtaaaagcagttgatgatataagttttgatatatataagggtgagatatttggattggtaggagagtcgggttcaggaaaatctacaactggtaaaactataataagactacatgaatctactggtggagaagtaatttacaaaggaaattgcatatcagataaaaaaacgtacaaatttataaaaaaagatgtaaacaaaagtatgcagattatttttcaagattctacttcatcattaaatccacgtatgacaattgcagatataatttcagagccactaaaaattcaaggtatctgtaaaaataaaacagatagaatgaataaagtatatgagatgctaaagctagtaggacttgatagaagttatgcaaataagtatccatctgatttttcaggtggacaaagacagcgtattggcatagcacgagctctttcagtagacccagaatttataatagctgatgagcctatagcttctttggatgtgtctatacaagcacaaatagtaaatttatttaaaaaattgcaacaagaaaagaatttaacttgtttatttatagctcatgatttatctatggtgagacatattagtgaccgtataggagttatgtataatggaaaattagtagaattggcagattcaaatgaattgtataataatcctattcatccatatacaaaatcactactttctgcaattcctgttcctgaccctagatatgctaagtcaagaaatagaatagagtataattctaatggatatgattgttcaaatgaaaagtcattaagttggattgaggtttcagatggacattttgtatattcttctaaatcagaaataaataaatatcaacaaaatttaaaagttgtttagtataaaaatacttgaacaggtatttatttgaaatacaaactaaaaccctatttttggagaaattttaaaactactccaaaatagggttttttatttctacttttcaaatataataaattcaaatataataaaattaaaaacaagtaaagtatgttgttaagaaagtgctataaaattaaaaatagtaatgtagaaaaaatgagcaataatcttattttttctacaataattttctataatttaaagtaaggaaagtttgataaattataaccttagttaaagaataagagtttattaaaaaataaagtgtgtataggggttttagttaataaaatattataatgtaggggagcttgtaatgatatataaaaaagataaagtaatgaaagttttagaatcatcatatagggaaaatgaaaaagggattacagctaaccaattatcagaaaagacaggaattgcaagaaacaatataagtacatatttaaaccaattattcaatgagggtatggttacgaagataaaaggaagacctgtgtattatatccctgcaaatcttaaccttaacaagaatgaattgcttgatacacaaagtgagttgcttggcataaaaaaaggaacaaaagtagaaaacaaaataaaaaaagatagttttgaaacactaataggtaaagaacatagtttaagacctataatagaaaaatgcaaggtcgcaatgctctatcctacaaatggacttcatactattatctatggagaaacaggagtaggaaagagtatgattgctagatatatgtacgattattctatagatagtggaattagaaaaaataaagctccttttgtaacatttaattgtgctgattatgctaataatgcacaattacttatgggacatatttttggagtagaacaaggagcttatacaggtgcagaatcttccagaaaaggtcttttggaaattgcaaatggagggatactatttttagatgaaattcatagactaccagcagaaggtcaagaaatgttgtttacttttatagataagggaacatttaaaagactaggagatgcaacgaaagaaagagattctaaggtattaataatatgtgctactacagaaaatccgacatcaacactattagatacattcaatagaagaataccaatgaaaatagaaataccatcactgagagataggacaatgattgaaagaatggaattagtcaaaaattttttcaaggaagaatcaaaaagtatttctatttcaataaaagtacataaagaaataattaaatcactattactttatgattgtaaaaataatgtaggtcaacttcaaaatgatataaaattagctgttgcaaatggatacctaagatataaaagagataataaagaaccagtttatatagagaaaaaatattttgataaatctataaatgaagtgagtgatgattatagagagaagtctattaaagcagatgaagttataacacatggaatagaatattttgtatttacgtcattaggagaagaagaagttattaactacaatgatataaatattattaatgcagtaaatactaatcttaataaatctgtagaaatgaatatagcagatgcttctctatttaataatgttaagtttaaaagcatgtgtgaatcaataagacaaattattaaagaagatgaagaaatagatataagtgaatcaatatttaagtcaatggcaatttatataaaaagcgtattggataaaagtagctctacaaacaacatagatttgaatcaaattagaagaaataacagaagtgaatttaaaacagcactaaaaatagttggaataattgaaaatgaatttgatttatttttatctatagaaactgtagcatatattacattattcatagtacaagctaaacaagatgaacaaaataaaatagtgaataacattaatattatagttgctatgcatggagaaactacagcaagtaatggtaaaagcagttggtgatattattggaaagtgcagtgctatttctttcgatatgaagttagataaaagctatgatgaagttattgtagattttaaaaatttaattaataatatagacaataaagatgtattactatttacagatatgggttcattaaactcctttgatgaaattataaagaaagaaaaaaagtgtgaagtaagagtaattcctatggtgacgacattaactgtgttagaagcagttcagaaggccaatatgggattacctttaaatgacgtatacaactctatcactaacacgagaaagtattattttggaactaatgaaattcaaaataaagaaaatctgtctaaaacaattattatagcatcacatgtttcagaaggtgtagataataaaacaagaaaaatattagaagaaaagatgagtaggtacttagatggaatagatattatatctgtcccatataaaacagaaaaagatttaagtttaaatattacaaaacttaaagaaagtagtaatattgttgcagtaatcaatgaacaaagaattaatattagaggaattgactatattagcaaaaaagatatagataaggatgaaaatatcaataaattaaaaaatattataaagataagtataggttatgatgatgtagttgaaggtttaaagacatccttaaaaagctctaattataataggatatttaaagatataaaatatgtgtctgatgaattgtttttagtatttaatatagaaaagaaatacgataaagtaattggacttatgatgcatttagctttcatggtagatgggttgattggaaatactagagaaattgaaaagcttgataaagaaaaaacacttgattatcacaagagcctaagcaaaataaaagatatagtatctcaattagataaaaaatataatatagaaattaatgaaaaagagtgctatcaaatattattaatattagaatatgcagaaataatcgaaaaagattaccaatgagtataaaaacttatttggtaattttttttagtctaaaataatattaatattagacacatataaatatacttagacaaagtatctaagttttgatgataaaaatgattgaaataacagtgttttaaagtgtctaaaaaaactggcataatacttgcttatattattaaatgagtaatataaataattaaaatttaaataaaaaggagtaaataatatgcaagataaaatattaagagataaaaaggcaaatgacccatgggcaagaatgactacaagaaacggatttagtgcagacgaaataatatcgtcatttcaaaaagctataagaagaaatatggtggaagaagcttgtgaatttgcttatgaactatatatatcatcaccagaattagaagataagctatggagaaggatacttacaatatcagttgaagatataggaatgggggacccatcagctgtaataatcataaataatttaaatcaagtaagaaaggaatattcatatgcagatggagacagacctttatttttcatacatgcaataagatatctttgtgcatgtgagaaagatagatcaagtgatttattaaaaaatataattataaaaggatttgcaatgggtaaagttccagaagttatggacgtggcacttgacaagcatacatatagaggattagaaatgggaagggattcattccactttttaaatgaagctagtatagtaataccagaaaaagaagtagataatgattataaagaaagatacttaaaaatattagaaaaatataagcaagaagaagttatagatacggctttcaagtttaatcattggcagtactaagaattagagtaaatattaataagaattaaaataaaataataagaattaaagtaaaaactgataggaattagagtaagaattggctgataaaaaattagaaaataaaagaggttagatattgtaggagggtaattatgaatattttattagtatgtgcaaatggagcttcaacaggtgtacttgtggaaaagatgaaaagtttttgtagtgagcatgaaaagttaaaaactaaaactataaatatagaggcaacatcattcgaaaatttaaaatcatacattgaagctaatgatacagatgtagtacttgtagcaccacaaattaggttcaaggaagatgatgtagttgaagcttgtaagaattacaaaatagcagttggtttaatagatactaagcattatggtcgtatggatgctccttctgttatgaagtcggcaatcgaattatataaaaatagataattggggggaataaaaatggaagcacttcaaaataatttaagaagatttcttctaccaatagcacaaaagattgaaaaacaaaggcatcttcaagctataaaagaaggtatgataagcattaccccaataataattgttggttctttaagtatgttatttatggcattaaacaatatgttacctgaaggaagtgcaaaaacattattatctgaaaatatggatacattacttatccctaataaatttactatgagtttattatctatatattcagcattttttatagctcaggcactagctaaaaaatataatcttaatcatgtagaaataggtatgacagcagttgttgcacaacttgttgtatgtggacaagtagtagatggtgtattagatacaagttatttagatgcacaaggtttatttgtaagtatattagtagcacttttagtagttgatattactaagtttatgaatgataaaaatctcgtaattagatttccaaaagaagtacctagtgtagtaaataaaagttttagaaatttaactccaatgatagtatgtataatgttatttacagcaatagcagcaataactaaaaatgtctcaggtcaaccattaccagctattataatgaatttcttagcaccagctataagcagtgtagataatgtttttgcagtaactataatactatttataactcaattattatggttctttggccttcatggagcagcaataacttcaagtatatggatgccaatagcagctacatatatggcagaaaatgcaacactgatagcagcaggaggagacccaaaatatgtgtttacaataggattttactatggtttcttgcaagtaactggttcagggataactttgggattagtgtaccttatgtcaagaagtaagtgtaagagttttaatagtatgggaaaagttgtgattttaccatcactatttggaataaatgagccagtaatatttggaacaccaatagttatgaacccatatatgtttgtaccatttgtatttggacctgtattggttggagcacttaattttatggcattaaaagtaggattagtaggattacctattgcagaaccaccaggctttttacctccaggggttgcagcatttttgatgacattagattggaaggcaatcgtattagtatttgcaagtataatacttatgaccttgatatattatccattctttaagataatggagaaggaagaattaaataaaaatgcagaattagctacaacattagatgatgatagctttgatttttaacaagtcattagaaggagaaggatatggtacctgaaatggaagaaaaagtatttagtataatatcagaagcaggagatgctaaaagtgatgtaatgatgtctcttaaggaaataaaaaaaggtgactacaataaagcaaaacaccttttaaattcagcctcagagaaaatacaaacagcatcaaagcatcatttagaattactatcaaatgctatgaatagtgaagatagtgggactgattttttagttgtgcactctgaagaccattattcaaatgcattatttgctcattctttagtatctgaacttgtagatatatttgagatgatggacccaagaattaataagaattaaatttcttgtaaatagtgcttgaagtttggctatagtttattaaatcaatagatttaataaatgaactcccttttactttaaagtactagtatttataaatttatttataaatacagtaaatttttaaatagaaaaggagatattattatggaaaaattttcagtagtaatagctggaggaggaagtacatataccccagaaatcatattaatgttgctagataacttagataggttaccattaagagcaatcaaattatatgataatgatgaagaaagacaaaataaggtagctaaagcttgtgaaatactaataaaggaaaaggaccctaatatagagtatttagcaacaacatgccctaaagaggcttatacagatgtagatttttgtttagctcatataagagttggaaaacttgaaatgagagaactagatgaaaagatacctctaaaacatggagtagttggtcaagaaacttgtggaccaggtggaatagcttatggaatgaggtctatagaaggtgttcttgaaaacatagattatatggaaaagtattctccaaattgttggatgttaaattattctaatccagcatcaataatagcggaagctgttagaaggttgagacctaattctagggtaataaatatttgtgatatgccaataggtatggaacataatatagcaaggattgcaggactcaaatctcgtaaacatatggatataagatactttggattaaatcactttggttggtatacttcaattaaagataaaaaaggaaatgaacttttaccaaaattagtagaacatataaaagaatatggttttataaatggtgaagaaggaatgaaaaatgacaagaaagatagttggtttgaaactaatttatttactaaagaaatagtaaaaacagatttaactacaataccaagtagttacttaaagtactatctatttccagattatgttgtaaatcattctgatgtaaattatactcgtgccaatgaagttattgatggaagagaaaaagaagtttttggttcatgtgcattgatagaaaagcaaggacattctaagggcagtgggcttaagataggaatacatgcagagtttatagtggatttagctacagctctagcttttaatacacaggagcgtatgttattgatagttcaaaataatggagctatagaaaatatacaagatgatgctatggttgaaattccatgtatagttggaaaagacgggtatgaaccattatcaatagggaaaataccaacattccaaaaaggtttaatagaacaacaattagcagttgaaaaattagtagttgatgcttggattgagaagtcttataataaattgtggcaagcacttatgctatctaagacagttcctagtgcaacagttgcaaaagaattactagatgatttaatagaagcaaataaaaattattggccaaaacttaattaagaataatatatttttaaagttcctacagtttagtacatagcctagttaatgtatttgtagggactttatttatttacaaatgagatacaagtggcaaacatagtgtattttgcagttaggaaagtaggtttagttacttgttagttggattaaatttaggtacaataatttactatcaatcaatagaaataaccagagaagttgcataataaaaaatttacacttttaacaggatttatgtaggtgtttatagaaataaataaatatgtacataaatacataattatttttaagtctaaaatacaagaatggagagatggctatgaagtggagagattatgctgatgatgtaaatttatttgaggattttgataaaactatcaagcctctaactgacgaacaaagaagaaaaaatataaacactttaattgcatatttttcaaaagaagttccttctaaaatatacaatttatcaaatgatgaaattaagcctagagatatacttagaggacttttgaatgtatatccaccaaaagaaattgctccagagatacttaatatgttacataatttattgttgattgaatgtgaagaaagagagttagtagatgtaaatgatatagaagaagtagaggaagggattgccatatggagaggtaatataacgaatttaagagcagatgcaatagtaaatgctgcaaataacaagttattagggtgtttacaaccattacatctatgcgtggataatgagatacattcatgcgcaggtcctagacttagagaagattgtgacaaaataataaaaaaacaagggcatttagaatatactggagatgctaagataactagaggctattgtttacctgcaaaatttgtagtacatactgttggacctattgtatctggtggtcagccaagtaaagagcaagaaaagcaactgcttcattgttataaatcatgtttaaatacaataaaagaaattgatgaaataaaaaatattgttttttgtggaatttctacaggtgtatttggttatccaaaaaaagaggcagctaatcttgctgtaagtagagttagactatggctaaaagaaaatcctgaaaaaaatttaaaagttgtatttaatgtgtttactgaagaagaagaagagaaatatagaagaatatttaaataatattatgtaacagaatcctaaaaatacttattatataatacaaattcattgtataagataataatttacaagtagtaaaaattaataaaatataatttgtatttttaataaataagtaggtataatagaaattataagaatagtataatcaattatgctattacttagaaaatataatataggaaaattgtatggtaaataaatatgaaaaatagttttaaaaattgtattagtttaagaaataaatttataattatatcaattgtgtttctattaatcctattaattgtatcttatatatttggcaaattagtgtataatagttcggttggtttagagcagttaataaaaaacgaagatatagtaaaaatattttctgagagaaaagataaaccactggagaaattaaaaaactacaagacatctgaattaatgatacaaagttctaataattacaagcttgaaagtctttttataacttcaaatataaagacaagagatactatgatacttgttcatggaattggaagtagttactatgaaatgttaaaggtagcatatagatatttagataaaggttataatgtattagtttataatcaaagaaatactggtaatagtggtggagataattacacatttggtctttatgaaaggtatgatttagatagtctagttaaatttgtaaaaaataaatttcctgaaggaagattaggagtgcatggattttccatgggagcagggacagctgctatgcattcagagataaattcaaaagatgataaggtcgatttttatatactggattctccttattctgaaatgaaagatgcaattagaatgggagtactagaaaaacgaataccagatatattaatcaattatgtggtgatttgtggagatttatataataagtttaaatctggattttggtacagtgatgtaaaaccatatgagtcagttgagaaatctaatgtacccatactgtttatacatggaacaaaagatactgtttgtaattatcaaaatagcaagaaaatgtatgatttagttaaacatgataaaaaagacctatggcttatagaaggtattggtcatgttgatggatttgaacatgatagtacagtatacttcaataaaatatttaaatttatagatagtaatgttttaagtgataaaagttaattgaatattagtagcttatttatttttgtatttattaaaaaatagataggctatttttatgtttaaatataagttttgtttagtaatgtgaattaatttctagtaaaaatgaaaataactaccaattaaattcatttatacctcaaataaaagagttagtattagattacaatcaaatctaaagaaaagagaggtagtatatatgaaaaacaaaaataataaagataaaaacatgttgaatattaaagtattgagagttctaggagtgctattaatactttttgattatacgggtgatactttgaatttttataatttcttcgcaaagccattagtatcgggtaatttatataagacaacaggtactgactgtattgtatttttattatttattgtagagtgtgtatacctagtgggaagatatatattaaaagttaagataaattggagtgagattattgaaaatgagaaaggtaattttataaataacttgttggttgaaaaaatacaagaagaaagcaacattgtatataatttattaaactcatatgtgttgccacatatatataagaaagcaagggtgttgatgtttaaaacatatcatatgttaatctacattaaagaaaaatactattatgtaaatatatattaatataatatgattgcacaattaattatattatattttgtattggatgataaaatgaaagacataaattttttgagacactaaaatcgcaatttatttcgtgtttaagttataaattttgtgaaaaattataaatcttataaaatagattgcgattttaatcttaaacttttgctatagtttttccagtatcagttaaatcatatccgccaagaccttgaagttcagctttaaactcaggagagtttattatgttaattatagtttggtaaactggattttgtaagtcttcttttttaataactaaatcatagcgctctttgtgaagaggaataaagtcgatattatttacttgtaaagcagctttttcatttcccaaaccaacatcagctattccacgagaaacagtacttgcaactccaagatgtgataattcttcattatcataaccttttatatgtttaccattaaagtttagaagtctaagtttaccatctagtaaaaccctagttccagaacctttttccctatttacaatggttatacttggttttgttaaatcctcccaggttgttatctctttaggatttcctttagcaacatagaaaccttgcattctataagctagatttataagtacacatggtattcctggcaatagctttttaacaaaagtgctattatattcatccgtttcgaaatcccatagatgggatgatgctatagaaactctgccattatataactcatacaaagcattataactacctatataagagcgaaatgtacttattccatccaattttttttcaacagacctagctaaaatgtctaatattacatcttgaccagaaataataattttgaaattattatttatatctatatttttattgttgaaatgtgtatcctttactttaccagttttttggctgttgatatattcttcaacatctttagtatcaactcttatttttttccctactttataagaaggaagttcacctcttttgattaattcatatacagtattttttgttatctttaataattcagctacctcgacaggtgtcaaagatgataatgagtccataatccacctccatataaggttattttaacattaaaaaaaggaaaatgtagcaaaatatttaaaagtagtgtaaataaattacttgaaaatttattatcatgtatatataattaaactatatataacaaaacatgataaaacataataaaacatattaaaatgtgtatcaaatttacaaaaagggagattgttatgaaaaaaatattgggaatattaggattagttgcatgtttaactttggggacagttgggtgcaatagtaatgaagacaaaacagatgatggaaaacaagaaaaaacaactaaaagtagtgattcagtagagttaaatatatcggctgctgcaagtttaaaagaagcaatggcaaagattgaagaagaatataaaaaagttgattcaaatgtaaaacttacagttaactatggagcatcaggctcattacaacaacaaatagaacaaggagcaccttgtgatttatttatttcagcaggtcaaaaacaaatgaaagctttggatgaagagaagttattagtttctgatactatgaaagatttagtaaaaaatgatttagttcttatttcttctgctgacagtagtgtatcaggtatgaaagatttgactacagataaagtgaagaaaattgctgttggtgaagttgaaagtgttccagctggtaagtatgcagatgaggtgttaactaatttaaatttaaaagataagttaaaagataagctagtatttgcaaaagatgtaaaagaagttttagcatgggtgcaatcaggaaatgctgatgttggattcgtttacttcagtgatactgtcaataatgataagataaaagtagttgaaaaaacagacgaaaaaactcattcacctattacatatccagtttcagtaattaaagctagtaaaaacgtagatgctgctaagaaatttgaagaatttttattaagtgagtcaggacaaaagatttttgaagaatttggatataaaaaagtagaataaacttataaataaattatgtgtaattaagtataaattatatataaataaatgaaaattgaaaataattgtgtattataataaaatggaaatagtgaaattaatagagttattagtttcactatttccatttaaaattaaggagggaaagatgggaacagattggtcacccttatggatatcacttaagacatctattttgtcaacaataataacttttgtaataggaatatttgtgtcatatattatggctaactatagaggtaagtggaagggtcttatagatggactatttacacttccactaattttgccaccaacagttgtaggtttctttttattattactatgtgggaagaatggatttataggaaagtttttattaaatttcgataggactttaatatttagttggacagcaactgtaatttcagcagtagtggtgtcttttcctatgatgtatagaacttcaaggtcagcttttgaacagattgataataatatgctgtcagctgctagaacattaggtcttaatgaatggaaagtattttttaagattgcagttccattagcatggcctggaataattggtggattggtgctgtcgtttgccagagctcttggcgaatttggtgctacacttatgatagctggaaatatacctggaaaaactcaaactatgccaatagctatattttttgctgttgaaggcggagatatgaataaagctatgatgtgggttatgattattgtagcaatatctatagcaatgattttattactaaattattggtcggaatttcagcaaaaaattataggaaagaggtgtggatagttgagcttatacgtggatattgaaaaagatttatcctcttttaaactaaaggtagaaattaaacaagaaaaaggtactctggggtttttgggggaatctggttctggaaaaagtatgacattaaaatgtatagcagggcttgagaaaccaacaagaggtaaaattgtattaaatgatagagttctatttgattctgaaaagaagataaatttatcaacacaagatagaaaggtaggatttttatttcaaaactatgctttgtttccacatatgactgtaagtcaaaatatagaacttgggcttttaaaactaagtaagagtgaaaaaaaggaaatagtagcaaggtacttagatatacttaaattaaatgggtttgaagggagatatccttggcaattatctggtggtcaacaacaaagggtagcactagctagagcattggcaacatctccagatatattacttttagatgaacctttctcagcactggaccatcatttaagaagtaatatggaaaaagaacttatgaatatgttaaaagattacaagggagatatactatttgttactcatgatattgaagaagcttaccgagtttgtgatgatattatagtgtacaacaaaggagaaggtcttccaaagagacctaaaaaagagctctttgaatctccaaagtaccttatagaagctaagataacagggtgtaaaaatatatccaaattaaatagactggataaaaatactatttatgctacagactggggatgcgagttgacattaaatagagaaataggtgataatatagaatatgtgggaatcagggagcatcatattaaggtcttggattctaatgaagatttaaatgaaaagttatgtttcgaattgattaacattgtagaaaatccttttacatatactatatatgttagaaaaactgatttatctaacgaatgtgtacctattcaaatagaattggaaaaaagtaaaatgagatttaagaaaggtgacagaatatatttagattttccacaggaatatttattttgctttagatacaattataacaaaaaggagtaaactatatgactgaaaaagaaaaaatgttgtctggaaaaggatactatgcaaatgatgaattgttagtaaaagaaagagagtattgtaaaaaattaactagattgtttaataatactttagaggatgaatatgaaaaaagagaagatattttaagacaactatttggttcagttggcaagcaaataaatgtagaacaaaacattaggtgtgattatggatataacatacatgtaggcgaaaatttctttgcaaattatgattgtatttttttagatgtatgtaaaattgaaataggtgacaatgtaatgttagctccaaacgttcaaatctatacagcctatcatccaattgatgcacaacttagaaattcaggcatagagtatggttctcctgtaaaaataggtgataatgtatggataggtgggggagtaatcataacaccaggaattactataggtgataatgtagtaataggtgcaggaagtgtagtcacaaaagatataccaccaaatactgtagctgttggaaatccatgtagagtaataaagaaaatagaagaataaatatgattgtataaagtttatacaagtaaaatttatacaatcatattaagagcatttacatataatctttaaatagataatacattaaaataaaaatatatgcctgtttctataaattaatttatagaaacaggcatattaatcgtatatagaaaatatctttctattcttgtttagtctttacataagaaatattttcattagaaggtttttccatacctaaagcttttaatatatcttcattaacaatgatatctgtatcatctgatgtagccacaggcatatcagatactgattcgccatttaaaattttaactgccatttcacctgttttgtaacctagtttttcgtagttgataccttgacaagcaagagcacctttttcaactggcccagattcagctgctataacaggtattttattctcagtagctattttagagactataggcatagaagaagccactaagttatctgtaggaacatataatacgtctattttgccaactaaactagaaataccttggttaacttcatttgaagtagttatacctttttcaacaactttaaatccatttttagatgcatattcttttaaagcatcaacttgaactttggaatttacttcactagtattgtacataactcctatagtttttgccttaggagcaaatattttaagaagttctaaacctttgtctacagaaacaaaatctgatgttccagatacatttgtgcctggcttttcaagagttttaactaatccagcagcaacagggtcactcacagcagtaataagtataggtatatctttagtagcattaaatgctgcctgagctgatggagtagatatagcaaatattaagtccttcttatcagatgcaaatttactcgcaatactttgtgtagtaggcatgtcattttgagcattttggaagtctatatcaatattttctccatctttaaatccgttcttttctaatgcttttacaaaacctatcctagtggcatctaatgctggatgttcaaccagttgagttataccaatttttttaacttctttacctttagaattactttcttgttttgaattaccagagtctcctccttgtgaacaccctgtaagcatagatatactaagagcaccagctaaaatcaaacttgccaatctttttttattaatcatttttatatccccctcaaaaatttattattatatatgttcatatattcatatgaattattacaaagtaaccataattattgtaattttaactttattttaaagccgagtttaatacaatagatatattattttaaactgcatattcaaatttttctaagatttcttcaactgttaattgttctttttctttaccttttacatctaatacaacttcacccttatgaagcattatcaatctatcaccataatgaagagcgtgttttaagttgtgagtaaccataagtgtagttatatttttttcccttacaatcttattagtcaattcaattacttcatttgatgtttttgggtcaagtgctgctgtatgttcatcaagtaataaaactgatggacttgttaagcacgacataattagtgataatgattgtctttgacctcctgataaaaattttacttgaacatcaaggtatttttttaaatcaagagatacaccttccaataaattttctaagaaatctcttttgtaacgaagacattttcttagatttaatagttttcctttgttaagagctaaagacaagttttctctaacagtcatagaagggcaagttccaagacttgggtcttgaaaaactctacttactatttgagttcttctgtgttcagctaaattagacaagttatgtttatttaataatacttgaccagaagattcttttataagcccggatattatatttaataaagtagatttaccagttccattactacctatgatacttacaaattcaccatcttctatatcgattgataaattttcaaagatagtattaggttcaccatatggattagggaaactctttgaaagatttttaatttgtaacatctacaacacctcttttttctgatttatttttggtactagctttgcatttgttttttttagtgaaatatttaagttaccagtagctaggaaagctattataactatggcagttattagttttaagtcagttgataacattcctaaactcattgcaaagtatatagtgaattggtatataaaagagccaacaattattgcagtagtatctttgataaaagtaaatttcttaaatagtgtaataccaattatgatagaggcaattccaagaactaaagttcctatacccatatttacatctgagaatcccaagaactgagccataagactaccagataaagctataagtccgtttgaaatcataagtcctagtatttttatagaaccgatatttatacccagagatttaatcatttgagagttatcaccaacaccttttaaagtgtatccaagacctgtttttaggaataaatctaaaaggattttacagatgaatacaaaagctaaggctaaaactataggagatatttccccattgaataagtgtttaaagctaaatagaggaatatttgattttcccattattcttaaattgatagagtatagcattcccataactaaaataccagaaagtaagttagatatcttaaacttaatgtgaagaatccctgtaacaagaccagcagtacaaccacataagatagccattaaagttgctactacaggagaaataccattagtaagagaaaatgctacaatagaagcacccattgtatagctaccatcagcagacatgtctggaaaatctaggattttgtaagttatataaacccccagtgccataatcgataaaattaaactttgcgtcattacagatataatacctgacataaataaaacactcctttgaaaatatttttataattttaattatttgctaattttgtgtataaaaaaaccacatagtgtacaaaactatgtggtaaaaacacgaataagccacatagtttaatctatgtggctcttatatagttaaatgaaaactttataaacaatatagccaacatagatacaatcccaaaattttaatagtcttaaggggtctgtatctatgttaaaacgtaggtacaaaccctaaaaatagtggctataataataataatattttctattgtttaataaagtattcataattatctctcccttttaatattttaattagtcagaaaattatatgtattctcgacttgttataaattataaattatacaataataaaagtcaactgctaaatttaattaaaatactaaataatgtatactcagaatacttttaaattaatgtattgtttgcaaaaaacgttatcctaagttataagtgaatgtggaaattttatcaaaatatttactaaatatggaataactagacatgtatatcaatcaaatatcataaaaaaaagctgtctggagaatattaaaattcttttggacagctcaagtagtgattagaaagttatataactttcataatcagtcgtcaatatagacgacttttatggaaaatgaataactttatatgcaatattcaaattgctacaataagcacaattttcaaagggttagggtggataagagtacttattatataaagttttcatattacctacttcatattacctattttttgaaattaataagttttattttgcagattttgcattttcatctgactttatatactttatattatctgctgataacttttgcatgtcaagtgcttttagtgtatcttcgttaattattatttcagtttcatctaatgtagtaactggtatatcgccaacagattttccttctaatacttcaatagcaagttctccagccttataacctagtttttcataatctattccacaacaagctaaagcaccagaagatacagaaccttcttcagaggctattataggaatcttgttttcattagcaactttagaaactattggcatagaagaaactattaaattgtcagtagggacatataaaacatctattttgccaactaaactagaaatagcttggttaacttcacttgaagtgctgattcctttttcaactacttcataattatttttcttagcataatcatgtagagaatcaacctggatttttgaattaacttcactagtattgtatataacccctattttctttgcttttggagtcaatgttttaaccaattctaatgttttatcaattgaaagataatcagatgtaccagaaacatttccacctggtttttcaagagatttaacaagtccagcttctacagggtctgtaacagcagtcattattattggaatatctttagtagcattataagctgcttgtgcagatggagtagatatagcatatatcaaatcttttttgtcggatacaaacttactagcaatactttgtgtagtaggcatatcattttgtgcattttggaaatctatttttatattatctccatctttatagcctttatcttcgagtgctttgatgaatcctttctttgctttatccagagacggatgttccactaattgactaatacctatatttttttgttttttgctatctgtttttttattttcatttgaagcattggagccatcattttgagaacatccagtaagcattgatacaccaagtactcctgctataattaaacttaatatttttttactttttatcattttattttcctcccttaaaatttaataattatatttgttcatatattcatatgatagattataaatatttctgattaaaactaagattttaatttcttatactgcatattcaaatttttctaagatttcttcaactgttaaattttctttttctttatcttttacatctaatacaacttcacccttatgaagcattatcaacctatctccatattgaagagcgtgtttcaagttgtgagtaaccataagtgtagttatatttttttctcttacgattttatctgttaactctattacttcatttgatgtttttgggtcaagtgctgctgtatgttcgtctagtaataagaccttaggacttgctaagctagacataattagtgatagtgattgtctttgacctcctgaaagatattgtactttaatatctaaatatttttttaagtccaaagaaattccttcaagtaagtgttccaaattattcgttttatgacgaagacatttttttaagttcaataatttccctttattaagtgctagagataaattttctctaaccgtcatagaaggacaagttccaaggcttgggtcttgaaaaactctacttactatttgagttcttttatactcagctaaatttgttatagtagtactatctaaagtaatttgaccagaagattcttttataagcccagatattatatttaataaagtagatttaccagttccattactacctatgatacttacaaattcaccatcttctatatcgattgataaattttcaaagatagtattaggttcaccatatggattagggaaactctttgaaagatttttaatttgtaacatctacaacacctcttttttctgatttatttttggtactagctttgcatttgttttttttagtgaaatatttaagttaccagtagctaggaaagctattataactatggcagttattagttttaagtcagttgataacattcctaaactcattgcaaagtatatagtgaattggtatataaaagagccaacaattattgcagtagtatctttgataaaagtaaatttcttaaatagtgtaataccaattatgatagaggcaattccaagaactaaagttcctatacccatatttacatctgagaatcccaagaactgagccataagactaccagataaagctataagtccgtttgaaatcataagtcctagtatttttatagaaccgatatttatacccagagatttaatcatttgagagttatcaccaacaccttttaaagtgtatccaagacctgtttttaggaataaatctaaaaggattttacagatgaatacaaaagctaaggctaaaactataggagatatttccccattgaataagtgtttaaagctaaatagaggaatatttgattttcccattattcttaaattgatagagtatagcattcccataactaaaataccagaaagtaagttagatatcttaaacttaatgtgaagaatccctgtaacaagaccagcagtacaaccacataagatagccattaaagttgctactacaggagaaataccattagtaagagaaaatgctacaatagaagcacccattgtatagctaccatcagcagacatgtctggaaaatctaggattttgtaagttatataaactcccagtgccataatcgataaaattaaactttgcgtcattacagatataatacctgacataaataaaacacccctttgaaaatattttaaatggttttttaaatttggttttaaaaaatgattttgatataaaaaaaccacacagtatatataactgtatggcaaaaattcgaataagccacacagtataatccatgtggctctatattatgatgataaaataaaaactttaacaacaattactatagccaacatagatacaatccttaaaaatcataatcctaaggggcttgtatctatgttatgacaatttgtcttaacttaggtacaaaccctaactaaattggctactaaaaaatcgtacttgtttgtttaataaagtcttcatatttacctctccttttaatttaataattttgaaaattttgttttctgttttgtatagtaattagtttaatacagtaaaaaataaaagtcaactataaattttgaaaaattatcaagttatcagaaaattgagtttaaataaaaaaatttttacatgtagaatatagttatattcttaattattgtttttttataaaaatgaaaaatataaataagtcataaaagattataaaaataaagagatatttagataattagtgtaaataggttttaaatcaacataataacttaaattatatggtataataaattaaataattgttttaattcaaaattttttgttattttaaattatttcaaaactcttagttttagtgattttatttatgatatttatgggattaaaagatttcaatagatatttttggtaagtatttaagaagtctttaactttataggagtgataatttatgctaataggtacatctaaattaagcagaaatgttgatactgcatgtgtagaagaagtagggattccaatgattgtattgatggaaaatgcggttatatctgcaatgaaaaatatggatatagacatgtataatagttatacagttgtatgtggtgttggaaataatggaggagatggtcttggaatagcaagacatctaaatacatatggaaaagaagtaaacgtatttttagtaggtaatcttgaaaaactaagtgaatgctctaaaataaattacaatgtacttttaaatatgggaattaatattataaatattaataaaaatgatttaagtgaaaaaaattatggagatgaaaatgaagtagataaaattattaaagttgagaaacaaaatattataaaaaataaaaatttaacaatttttaaagatagagtatctaaaagtgatgttgtagtagatgctatatttgggactggattaaaacgtgatataactggtatttttaaagaagttattgacatagtaaacgataatagcaaaaatacatattctatagatattccttcaggtatagatagcgataatggaaatgtattaggaacttgtattagagcaaacaaaacgattagctttgagttttataaaagaggttttctaaactatgacactagcacacttataggtgatgtagttgtagaaaagataggtgttccagattttattacaagaaaataccatgatgaagagttcataactgataagacttttgtaaaaaataatattagaagaagagataagcatggttttaaaagtgattttggaaaagtatctatagttgcaggttcaaaaggattttatggtgcaagtttcatagcaactgaatctgctgttaagagtgggagtggacttgtaacattaattagtagtgaagatgtgcaagaaaaggtatctattagacttacagaagcaatgactttaaattttgaagaagaaagattaaataaattacttaattctagtgatgcaattggttttggtccaggtatgggagataatagtcaaacatttgataaattacttaagatagtagaaaattctaattgcccaatagtattagatgcagatggattgaacgttatgaaggacagatgttataagtttttagaatggaaaaatagatttgtaattacacctcatttgggagaaatggccaggttgacaggagattcaattgggtatataagagaacatagagtagatgttgcaaaagaatttgctcaaaaatataatctggtggtgcttttaaaaggttatcaaactgtcataacagatggtaaaaaaacatatataaatcctacaggaaatagctgtatggcaactggtggaatgggtgattgtttgcttggaatgattacttcatttataggtcaaggtatggatatattggaagctacagttagtggagcatatatacatggctatataggagataaattgagcaaagcaatgtatacggtaaatgctacggatttaataagtaacatttcattaacaatgaaagagttgttggatatataattgattaaaaaatagctacgcacacttgtgactttagtcatgagttagtagctaaaatagtcagcatatagggaaacctatatgtagagataggatagaacctatccaatactacttgaattgctaaaatcccctaaagctaactaaactaaaacataaggatgaaataaacctaagtgtgaaagttacgaaagtagaaaaaattggttagatggtataaggttaaatcctaagtactttaaaatgggcaatcagcaggtaagctccgaataggagaaacttcaacgactattcctcttgagggaagtacactacaagttatcggtagtggaagtggatagaccttagcggataatgccgaaggataagatatagtctgtgcttacatgaaagtgtaagaagttcataagagaactgcataggtagtagcgaacttatgtgaacgacaacctcaaaaatgataaaagttaagacttacggttcttaaatatgttatttaaaaataaatataaaaaaccttcaaaatacttgttttaagtaattgcatattttaatattatgataggtgatgaaaaatggaagttactcatggtagaggatatgcatataatatgtcaaatatagacatccagtattatggggagacatctttggaatcctagttatttcgttgccactgtatcagaaaatacagaggagcagataagaaaatatattaataatcagaaaaagcaagtaaagtgaggtggcagtagtggaaaaagcttataagtttagaatgtatccaaataaaaaacagcaagagttaattaacaaaacttttggatgttgtagatttgtatataataagtatcttgctaaaagaatagaagtttataaaaacgataaagaaacttttacttataaacagtgtagttctgatttgaccaatttaaaaaaagaattaaagtggcttaaagaacctgacaaattttcactacaaaacgccttaaaagatttagataatgcatataaaaaattttttaaagaaaaagcaggatttcctaaatttaaatcaaagaaaattaatagattttcatataaaactaattttacaaatggaaacattatgtattgtggtcaacatataaaactacctaaacttggtatggttaaggtaagggataaacaaatacctcaagggagaatacttaatgctactatatctaaagagccaagtggtagatattatgtatcattatgctgtactgatgtagatattgaagtatttgaaaatactaacaatcagataggtttagatttaggaattaaagaattttgtatctcaagttgtggagaatttatagaaaatcctaagtatcttaagaagtcattaaacaaacttgctaaattacaaagagaattatcgagaaaaacaatcggtagtttaaatagaaataaagcaagattaaaagttgcaagacttcaagaacatatagctaatcaaagaaatgattttctacaaaaactatctactaaattaataaaagagaacgatattatttgcatagaagatttacaagtaaagaatatgattagaaatcgtaaactatctcgcttaatttctgatgtgtcatggtcagaatttgttcgtcaattagaatacaaggctaattggcatggtagacaaattgtaaaggtaggtaaattctttgcaagttcacaaatatgcaataaatgtgggtataaaaacgaggaagtgaaggacttaaatataagagaatggatttgtcctagttgtaatgaaattcacgatagagatataaatgcaagtataaatatattaaaagaaggattaagactaataacgattcaaaataaataacttatgtaagaaccgtaggaactacggggatagcctgtggagaattagtaagacatatgttagtatgcaaaattctatgaagcaggaaccctgtgactttagtcatgggaggttcagactactttgtaacaattttaacaaagtatgttgatataatactattaaattaatcttagattagtttattctattgatttgtagtttaaatttatattcaaaaacattgtataaacatataatttatatagggttttataattcatatgaaaagagggtagatagtatgaagttaatatggttgatagtagcagtcttatttggaatagcagaaatgttaacaccaagcttaacattgatatggtttagtgtaggagctgtaatacttatatttttaagtagctttatagagagtattttcttacaaattttaatatttgcagtaatttctatagcaatgttagtcgtagctactaaaaaaatagtaaaaaaagataaaggctataaatctaacactaatttacaagcaatgatgtctaaaaaaggtattgttacagaagagatttctccaaataacacaggtctagttgtagttgaacatgaaacatggacggctatttctatagatggtgaaaagatagaaaaaggttctacagtagaagtattaaaaattgaaggggtaaaattagttgttaaaaaagtagacgccacagttaatgtgacaaaccaatagaataaaggaggatttatagtatgggtactaaaattgttttaagtattgtattaatagtagtagtcgtagcaataagtttaacgtgtataagagttataaaacaatctaaagtaggtataataatgagacttggtaagtttcaaaaagtggctgaaacaggtgtacatttcttaataccatttttagataaaatggcatatgtaattgaccttagagaaattgtaatagattttccacctcaaccagttataactaaagataatgtaactatgcagattgatacagttgtatattataaagttacagatccagttagatatgtgtttgagatagctaatccaatagctgctattgaaaatttaacagctacaacactaagaaatataattggtgaacttgatttagatgaaacattaacatcaagagatataataaatgtaaaaatgagaactatccttgatgaagcaacagataaatggggtataaaagtaaatagagtagagttaaaaaatataatgcctcctcaggatattcaagttgcgatggaaaaacaaatgagagcagaaagagaaagaagagaggcaatacttcaagcagaaggtaataagtcagctgcaatacttcaagcagaaggtgaaaaacaatctgcgatattaacagcagaagccaaaaaagaagctatggtacgtgtagcagaaggtgaaaaagaatctgctatattagtggcagaaggtgaagctgaagctataagacagaccgctattgctaaggcacaaggtgaggctgaaatgataaaaagaactcaaatggcaacagcagaaggtttaaaattagttttttcagcaatgaaagaggctgatatagacaataatattctagcattaaaatctatggaagctcttgaaaaaatggctgaaggtaagtcaacaaaactggttttaccttcagaagcagttaatttcctaggaacattcaaaggaataaaggaagttatgagtgatgataacaaagaagtacttgatataaaagaagttttaaatgataatgaatcattaaaaaaataaaagagttttgttatcataggaaggatatggaaattaaaggtcgaattaattaaatatagcacaaaaatgcacgttgaaaagaagaggacttataaatttttaagtcttcttctttgtttttattagaaagatgaaattataaaaatgaattaacagaatctttatacaatttatcctttactaatgtaaaaagtgttatataatattatataaaacatatagcaaataagcatggttttagttagtctatttatattattaatatatatttataaaaatataaacattaatactaagaaaactaataaataatttaaaagtttatatccttttgtttaaattatagacaaagaagtatcaattaaaaaataaagttgattaataattacttgattttctttggataattatttaacaaatattagattatattttgctattacgaatttaacaaattaaaaaataagcatgtttatatgacacaagggatttataaaaaatgtttttatatttataaaataaaatttgtattattttttaaccgataattgaatattaataaatactatagtgcttatggaaaataatgtatacgtcggtaagttcattatggggtatacattatatcaattgtatagttgatattattttatttttattaaggtattatttaagcaacatttatacacggcatttattgactgataaagtttataaaagtaaaaatgcaattataaatattaattactagatgaggggagtgtcattaaatgaaaaaagagatgttagctatgattttggcaggagggcaaggttcaagattaggtgtttttacaaaaagaattgccaaaccagctgtatcatttggaggtaagtatagaattatagattttgtgttaagtaattgttcaaactctggtattgatactgtaggtgttttaactcaatatagaccgttgatattaaattcacatataggcatgggaagtcattgggatttggacagaataaatggtggtgtctatgttttacaaccatttatgaatgaaaaagaaggaaattggtataatggtacagcacatgcgatatatcaaaatatggactttgtagatacctataatccagaatatgtattgatattatctggtgaccatatatacaagatggattatagcaaaatgttaaaatttcataaggaaaaacgctctaaagctacaatagcagtgattgaagttccttgggatgaagcttcaagatttgggataatgaatacaaatgaagattcaagtatctatgaatttgaagaaaaaccaagtgaacctaagagcaatttggcatctatgggagtatacatatttgattggaaaatgttgagaaattattttaaggaagcagaaaaaaatccagaaataaattatgatgattttggaaaaaatttaatacctaaaatgttagaagataatgttggaatgtatgcttatccatttaaaggatactggagagatgtaggaactatacaaagtctatgggatgctaatatggatataataaaatctccagaaacacttgatttagcagaccctaaatggaagatatatacaaatactatggcaatgcctccacaatatataggtaaaaatgcaaatgttcatagatcaatgatagctgatggttgtagaattttaggtgaagtaggcaactctgtattatcacatggagttgttgttggtaaaggaagtaaagtaattgattcagtaataatgccaaatgttgtaataggtgaaaatgtaactatagaaaaagctatgataggtgagtgtgcaactataaatgataatgttcagataaagaatgtaaataatgaaataaatgtagtttctgagtatgaaaatatcgaacctagatgcgtattaatagaaggaggtctttaagatgagaaatgaatgtttagggataataaatttaaacaaaaaaggagacccagcaataaacaaacttaactatggaagaccaatagcatctacaccaatagctggaagatatagaataatagactttgctttatctaatatgataaattcaggaatcactaaagttggaatattcgcaaaagaaaaatacagatcattgacagaccatataggtagtggtaaagattgggatttaagtagaaaaaaaggtggcctatcaatttttagtccagaaaacactaagtatagaaatacttactcacatagagaaggtgatatatatactatcttagctaatctagattatatagaaaagagtgaagaagaatatattttaatagctccaagctatatgctatgcaatttaaattattctcaagcattggaataccataaaaaatctcataatgatataactataatatataaaaatgtaaataatgcaaataaagattttgctggtaacttaacactaaatttagatagtaacaatagggtaataaatgtaggaaataatttaggcaaattccctagagcaaacatatgtatggagacatatattatgaagcgtgaagattttgttgaatgtatatataacattgtaaataaaggcagttattgttatttagaagaatttattattgaagaagcagaaaatatgaaaataggagcttatgaatatacaggatatctaaaatgtgtaaattctgttgaatcatattttgaaatgagcaaagatttattaaatttagaagttgcagatgaattattatactctgaaagaaagatatttacaaaagaaaagaatgaatcacctacaatttatacagatagtgctaaagtagaaaatagctttatagcatctggttgtttaatagaaggtactgtaaaagatagtatcatatttagaaaggtaaatgttgaaaaaggaacagttatagagaactcaatagtaatgcaaaattgtgtaataaagtcaaatgcaaaactatataatgcaatattagataaaaatacgagtgtatcaaatgggaaagaattaagaggagatgaaaaatatcctcttgtagtggaaaagaatacaaatatataaataaattttttagaagggggaatgactaatgaaggttttttatgtaacagcagagtgttggccctttgcaaaaactggaggattaggagatgtttcttatgcattgcctaaagaattaaaaaaagaaggtgtagatgtaagggtaataatgcccaaatattcaactataccaagttatttaaaagatcaactaaaagaaatagctgtgtttagtgtacgtgttggatggagaaatcaatactgtggtcttttagaaatggaattggatggtgtaaaattttactttatagataatgaattttattttagaagagaagatgaaagaaagagtatctatggatatggagatgatgcagaaagatatactttctttacagatgcagttttagaagctataagtagaattgatttttatccagatgtaatacatataaatgattggcatacagggatgttaccattaattctaaaagaaagatatgcaacccttgaggggtataaaaatataaaaactatgtatactatacataatctccaatatcaaggtgtatttgataagcatgttttatatgatatattggacttaccacaaaaatactttgataatagagatatagagtattatggctcaataaattttatgaaagctggtataaattttgcagataaaattataactgttagtcctacttatgcaaatgaaatacaaacatctttttatggtgaacaattagatggattacttagaaaagagtcaggaaaattaaaaggtatattaaatggtatagattatgatttaaacgaccctgcaaaagataaagatatatttgttcattatgatgtagactcaattgacaaaaaagtagaaaataaattgagattacaagatatattgggacttaaaaaagattcatctattccgttgataggtatagtttcgagattagtttctcaaaaaggatttgatttaatagcatacatgatgccagaacttatgagagaagatttacagattgtcgttttaggaactggagaacatcaatatcaatcaatgttcaactattacgattctaatttttcagataaagtatcagctagaattacttttaatgcatcattggctcaacagatatatgctgcaagtgatatgttcttaatgccatcattatttgagccttgtggtataggtcaaatgttagctatgagatatggttctttaccaatagttagagagactggagggcttagagatacagtaacaccttataataaatttactggagaaggcaatggatttagttttaaaaattacaatgctcatgagatgtttttctgtttgaaaaatgcaatcaaagtatttaaggacaaagaaaaatggattaaattagttgaaaatgcaatgaaaacagataatagttggaaaaaatcagctaaggagtatatagaaacatatagagacatatgtgattaaaggagtggtttttttggtaacaataagcaaaaagaaattcaagcaaaaatttgaagtaaaaatgtatagcttatatgcacaatctatcaaggaagctactgatgaacaattgttaaatgtattatgtagtctattgaaagatgagatagcaaaaaaatgggttgctacaaagttagataagaaaaaagaagtttattattttagtttagaatttttaatagggagacagttaaaatctaatttattaaatttaaatattgaagaagaagttagagaaggtttatctgaattaggaatcaacttggatgatttaattgaagctgaagtagacccagccttaggaaatggtggacttggtagattagcagcttgctttttagattctatggcatctttgaacataagtggtcaaggatatggaataaggtataaatatggtctgtttgaacaaaaatttgtaaatggttatcaggtagaagtgcctgataactggcttacagaaggacgatatgcatgggaaactgtaagaccaaatgaagcaacaatggtgaagtttggtggtgaggtagaattaatcaaggaaggtagtcatttaaaagtaattcataaaaactaccttcctgtaatggcaatgccttatgatataccaataatcggataccaaaaccaatgtataaatactttaagattgtttaagagtgaaataccaaagagagattttggtgaacttacctcaaatgctctaaattattctggtagctatgaagaggctttaaaacataagtattatactgaggaaatatcacaggtattatatcctgatgattcaaactatgcaggtaagttgttgaggttgaaacaagaatacttttttgtaagtgcagggatacaagatataataagaaaatataaaaagaacaaattaaatattgataatttattcgataaggtagcaattcatataaatgatacacatcctaccttatgcataccagaacttatgagaattttgcttgatgaagaaaatttatcttgggatgaagcatgggaaataactaaaaaaacagtgtcctatactaatcatactataatgtcagaagcaatggaaaaatggcctgtaagtatgatgaaagaactattaccaagaatttatatgataatagaagaaataaatagaagatatgtagaggaattaaataataaaggatatgagcaggatagaataaaaagaatgagtataatagactgtgacaatatcaatatggcaaacttatgtattgtcacaagtcatagtgtaaatggagttgctaagcttcatactcatattcttgaaacagaggtattaaaagatttctatcaagatgaaccaaataaatttaataataagactaatggaattgcacataggcgatggcttataagttcaaatcctcaacttagcaatttaattacagatttaattggtgattcatggaagaaggataccttacaattaaaaaatattgaaaaatttaaaaatgattcctctgttttacaaagacttgatgatataaaatacaataataaagcaaatctagcaaagtttataaaagataaatacgatttaaatgtagacccaagttcgatatttgatgttcaagttaagagattgcatgcgtataaaagacagttactgaatatatttaatgtacttcatatgtatcatgaattacttgataatcctaatttgaatcttgacccaagaacttttatatttggtgcaaaagcagcaccaggatattatttggctaaatgtataattaaatttataaattctgttgcaagtactataaataatgatgttagagtaaaggacaagttaaaagtagtatttttagagaattatggagtatcattagcagaaataataataccagcagcaaatgttagtgagcaaatttcaactacaactaaggaagcatctggaacaagtaatatgaagtttatgatgaatggtgctataactttggctacacttgacggcgcaaatgtagagatatgtgaacaggttggtaaagaaaatatgtttttatttggacttagtgcagaacaagtactaaattataataaatatggtggatattcttcacttgacttatatcattctaatatggatataaaaagggtggtagatgatttaataaatggatttattcctaatcttggcgaagaaggaagaagtatttataattcactcactacttacaatgatgagtattttgtattgagagattttgaaaattatggtcaagctcaagcagatataaacaggttatatagagataaagaaaaatggaataaaatgtctttagttaatatagctaactctggatttttttcttctgatagaacaatttctgagtatgcaaaagacatttggtttaaaagggtgtgattaaatgcaaagtgtaatagaatataactcttgggataaaaattttaaggctccgtttggagctttaaaatttgatgaggaattgaccatttgtgttaaagtaaatgagggatacaatatcaagtctatttccctagaaataaatagagaagaagaaatgagaacaataactttaaatgaagaattagataatgataaacttggaaagtgcttttgtggtaagattgaaaagtttgatggtacaggtgtttatttttattactttaaagttgatgttgaaatggatggtcagataaagactttattttatggaaaaaacagagataatggatattcttgtgaatataattatagtgatattaataaatatcaaatcactgtttacaaagattttaaagtaccaacatggtacaaagaaggaatactttatcatatatttgtagatagattcaataatggaaatcgtagtggtaaggttgataatcctaaaaaaaatagtttcatatatggaaattgggaagatatacctatgtacataaaggatagtcaaggggatgttataagatgggatttccatggtggaaatttaagagggataatcaataaacttggatatttaaaaaaattaggtgtaagtatactatatctaagccctatatttgaagcttctagtaatcataaatatgacacaggtgactataaaaaaattgacccaatgtttggggatgaagatacatttaaagaacttattgataaagcaaaagaaaaaggtatatcaatagtattagatggagtttttagtcatactggagcagatagtaaatattttaatatgtatggaaactataatagtttaggggcatatcaatctaaagaatctccatattattcatggtatatgtttgaagaatttcctcaaaagtataaaagttggtgggatgttaagacattgccaaatataaatgaattagaacatagctatatggattatataatatatgacaatgatagcgttataaataaatgggtaaatatgggtattaagggctggagactagatgttgcagacgaattaccaactaagtttataagagagttaaaaaaggaattaaaaaaggcagatgatgactcaattcttataggtgaagtatgggaagatgcatcaaataagattagctatggtcagagaagaagttatttattaggtgaagaattagattctgttatgggttatccttttagaaataacatgttttctttcttaaaaggagaaattaattcatatgaactttgtaatagatatatgcagattaaagaaaattatccaaaagaatcatttaggtctaatttaaatttaattggaacacatgatgttacaagagctaaaacggaattaaatgatgatgtagatttagtgaagcttgctgtagctatacagatgacatttgaaggagtaccatatatatattatggagatgaagcaggtctttgtggaggtgttgacccagataatagaagaacttatccatggaaaaatgaagacgaagatatgcttaatttttatagagatgttataaaaattagaaataagaataaacttttaagttctggaaatacagaatttatatatactaataatgattctgtattttcttttattagagttgatgaaaataatgatagaatgttaattttagtaaatagaagtgaaaatgtggaaagtatatcattatgtatagagagtagttttattgaggaaatacctataaagtatagtcttaaaaatgcaaatagtactatacaaattgaaaataatgagttgaaagtagatttagactctaaatcatttagaatttttagagtaaattaaatatctttttttagaaaaataaatagaaaataaggtgaatgtagaaagagttttgttttatcaaaactttttctactttttttgtataaattatcataagaattttagtgtttcaaaatattacaaagaagtataaaaaatatcataattgtgatattatataaattagtaagataaaactgaactctctaccaaagttgtagggagatttaacttttataatcttaatatggaggaacgtcttatgaaggtagatccacttacaactcaagtatatgactatatatcaaagaaaatccaaaatggagagtatgaagctaatcagagaattactgaatctgagatttgtaaatctatcggagttagtagaacaccagctagagaagcattaactaggttagcaggtgaaaatttactagaaaaaatacctaataagggatttgtagtaaaagaatttcaggaaaaggagaaattagacacctattccgtaattggagtattggatgcgttagccggttcttcagcattacaaaatttaactgaatcagacctagtaaaaatggaagaattaacagaaatgatggcggtctctataaagtataaaaattacaatagctatttaaaattaagtaatgaatttcacgatatatacataactaaatcagataatcaggtgttagtaaatctattgaactctttaagatataattttatgtcaaagtcatatactagtgataatgaagatgagttatataaaatgttgacatacagcaataatcaacatattgaagtagtaaaatttatgagggagaatgatttagaaaatgttgaaagagttttgagagaacattggaaaacgatacctatagcagagatgaaaaaagagaagcttttataaagtttctctttattttttttataattttgttattttactattaaatattaaaggaaaaacaagaataaatttaactttaaatacaaataaaaactctaaggcactacgatagaataatatatttaaattaacatatataaatcaatgaacttatagaattttaatatcataaatatagaatttattttatcaattaaaaaatttaataaattttatattaaaattaaaatacaaaaataggaaaattatttagtccaactaaaccaagaattttgatatatgaaataagaataatataaaagtttagtaataaaatacttataaattaaaaatagtaaactcaaaagcttactaaaactcaaaaaagtaaaaaaagcaaaataataaaaaataagaaagtttataaatactaagttttaaaaaaattaatataaacaacaaaaaaataaaaagtttataaatattgatatagctaatgtatatgtttttgagtaacttcaaaaaaacacttgtaaaaatgctggaatgttaatataataaatatcatgagtttaataaaagtaaaaataaaaaatagaaataataaataataaatattaaaaatatttgaatatagagaggagatgaatttgaaatcatggatagcgagtttgcaaatgcagttgaattaagctatgagtgtgctccattattagagtcgttaaaggaatactcagagaaagatatagcttgttttgatgttcctggacatgtaaaaaatagaggtgtagctatattaaataaatatctaggtgaaagtctcatgaaaatggatataaattcatcaccaactatggataatgtatctgcgccaaatgggattataaaaaatgcacaagatttgctagcacaagcatatatggctgatgaggcattctttataacgaatggcacaactcaagcaatacatgcaatgattttgagtgttataaaaccaggtgaaaaagtattacttccaagaaatatacataaatcagtaataaatgcgttaatactttgtggaggaataccaatatttatacaaccagaatttgatgaaaaactaggtataagtttaaatattactcttgaaaaagttagaacagagatagaaaaagattgtaatataaaagcattatttttccttaatccaacttactatggagtttgtgcagaccttgagagtattatagaactatgccataaaaataatgttttagtgttagttgatgaagctcatggtgcacattttccatttcatttagatttacctccttctgcaataagtttaggagctgacatggtagctgtaagtatacataaaactggaggagcattgacacaatcttcagcactcttattgaatagagataatgtaagttttgaaaaggttcttcaatcaatcaatatgctacaatcaacatcagcatcttatttgcttatggcaagtatagatggtgctagagttaatctagttgagaatggtgaaaagcaactgtcaaaagcattaaatctatctaggtatgcaaaatctaaattgaacaaaattgatggaataaaagttttatctacagaaatattgaaacaaaaaggtgttaaatttatagatgaaacaaaattgtgtataaatgtaaaagaattaaatttgactggatttgaagtatacgatttattatataaaaatttttcaattcaagtagaattgggagattcatataatatactggcacttgtgtccattggaacaaataaatcagatatagatagattagtaaaagcactttctataattgcaaagatttatagaaaagaatcaacattaaatgaatttaatatggttcaaataaatccaattattaaacttaatccaagagaagctttttatgcaccaaaggaaagtgtagaaatcaattcatgtatagatagaatttgtggagaatcaataatggcatatccaccaggtataccgattattgctccaggagaattgataacagaagaaattatggagtatattattttcttaaaaaatagcaatgcgtatcttacagatgtacaagataaaaacttagatagaatactagtaataaaataaattactttattttgcaagggcaagtgtttgttaagtagagtttatcaaatagaacttattaaaagtataaaggagttggggttgaaatgaaatttgaaacactaggaagacatatactagtagaatactataattgtgatgaaaacgtacttaaagacccacgtcttatagaaaattttatgaatgattcagcattaaatgcaaaagcgacaattgtggattctgtattccaccattttaatccttggggggtttcaggagctgttataattgctgaatctcatttgacaatacatacatggcctgaatatggttatgcagcagcagatttttttacttgtggtgatatagacccatggaaaagttttgaattattagagcaacttttaaagtctgaaagaagcgagtctacagaaattccaagaggcttaactacaaaaattaaaaaatattcaaaaaaagatttaggtaagattactcataaaccagaagcagtataaaacatacaagagaaagtgaggattattatatggaactttggtatacagaagaatggacagaaaatgtaagattttctataaaagtaaataaacatctatttgaaggaaagtctcaatttcaaaggatagatgtatttgatagtgatgaatttggaaaatttctaacaatagatggattaatgatggtaacatataaagatgaatttatataccatgagatgataactcatgttcctatggctacaaatttaaacataaagaaagtattagtcataggtggaggtgatggaggtacagtaagagaattaagccgttatcctcaaatagaaaagattgacatggttgaaatagataaaatggttgtagatgtatctaaggagtatatggatatatgctcatgtaaattagatgataaaagagtgagtttatattttgaagatggtgttaattttgttaagtgtgcacatgataaatcatatgacctgataatagtagattcaactgacccaataggaccaggcgaagggcttttctcaactgatttttataaggattgttatagaatactgactgatgatggaattttagtaaatcaaagtgaaagtccgtattttgactttaatgctaaagagatgaaaagagctaataaaaaattaaaacagatatttccaatatcagaagtttatcaagcacatataccaacatatccatctggtcactggttgtttggatttgcttcaaaaaaacttaatccagtaaaaaatcaagatagaaatggatgggagaaattaagtttaaaaactaaatattataatagtgatatacatttaggttcgtttatgttacctcaatacgtgaaggagatgctagatgaagaataatttctatcatatgaacacttttatgagtatggacaaaaattatgaagaatctaatcttatagtatttggtgttggatttgatggaactacttctaacagacctggggctagatttgcaagtagctctatgagaaaagaattttacggtcttgagacatatagtccttttttagatttggacttagaggattataatatatgtgattatggagatttagaaattagtgttggaagtacagaacaagtcttaaaagaaatctatcaagagacatataagattgttagagattcaaaggtaccctttatgattggaggagagcatttagttacattaccagcctttaaagcagtacatgaaaagtacaatgatatatatgtaattcattttgatgcccatactgatttgagggaagaatataataatagtaaaaattctcatgcaacagtaattaaaagaatatgggatattgtaggtgataataaaatatttcaatttggtataaggtctgggacaaaagaagaatttaaatttgctacagaagaaaaacacacatacatggaaataggaggaatagatacgtttgaaaatatagttaatatgctaaatggaaagaatatttatctaactatagatttagatgtattggatgcatctgtgtttccgggaacaggtacaccagaacctggtggtgtaaattatagagagtttcaagagatttttaagattataaaaaactctaatataaatatagttggttgtgatattgtagagttaagccctgattacgatacaacaggtgtatcgacagttatagcttgtaaaatcttaagagagttatgcttaataatatctgataaaattaaatagagtattttatataaatagtatatattataatataagaagttattttaaaaaagttagtttaagtttgacgcttttctaaagtaacttcttatttttgtaattaaaaataaatataataaacaacaaaaaagagccctcgatagctccttttctaaaatatatatatttaaattaaataattatattctatttacgttttcagcttgaggtcctctattaccttgagttatatcaaagctaaccttttcgccttcttctaaagttttgtatccatcattttgtatagctgagaaatgtacgaaaacatcatcttctccctctacagatatgaacccaaatcctttttcattgttaaaccattttactattccgtttttcattataagaaaacctccgcattattaaaaaatacaaactaaaaaaataagtctgttctattaatataacataaattttaaataaaagcaaataaaatttttaaaaaaattaattacttttagaatttaataaaaattgttaaattatacagtgagaagtattgtaaaatttgacgaaaatgtaaatgtagataataaatttaatgtcaaaaaatgcaacaaaaaggtatgtaagtaaaaagtaaaattaaaatatataataaaaaatattatatattagattaaaaagtaaaaataaaaatagtgaaatttcagaaatatcaataatattatataataaaataaaaaaacactatatatattcgataaaataaaatttaaacatataatattttatgtatatattaataaaaggacatattgtgttataatggtatcgtataaaatcatttacgggggtggtattaaaatgtttcaatttgaaacacaaatacacaaattaagacatgatgttttaactgcaatagctagacttggaaaagaagataaccttaccagagaagcaatggataatattcagtatgaaataataaaaggtgagaaacctacatacagatgttgtgtttataaagaaagagctataatatctgagagagtaaatgtaagtatggggttacaaccaggtcaagataagatagatttagatacaatggatatagaagaagatgaacaaattatatatattttggaagctgcatgtgacagttgtccaataaatgaatttacagtaacagatatttgtagaggatgtctagcacatagatgtaaagaagcttgtaaatttggagctataacacatgtcggaggaatggcctatataaatcatgaattatgtaaggcttgtggaatgtgtaaaaaagcttgtcaatatgatgccatctcagaggttgttagaccatgtaagagtgtttgtccaactaatgccttaggatttgatagagaaaatatgaaagctatgatacatgaggataaatgtttaaactgtggagcatgtatgtcagcatgtccatttggagcaatatctgataagagtttgatagctcctgtagctagaaagttggttcaaaaagagaaaatgtatgcggtagtagctccagctataacaggtcaagttgaagcaaatgttacatatggtcaaataaaaaatgctataaaatcactaggatttgttgatgtattagaagcagcttgtggagcagatgcagttacagttcatgaaagcttagaatttgctgaaagaatggaaaagggagaggcttttatgacaaattcttgttgtccaggatttgttggttatatagaaaaaacatacccaaatcatgtaggaaaaatatcttctacagtgtctcctatgatagctagtggtagatttataaaaagtcatgaaccagatgctaaagttgtattcataggaccatgtacagccaaaaagagtgaggcagctaagaaagaattaaaaggagctgttgattatgtacttacttttgaagaaataatggcattatttgaggcatttgatatagacttggctaagtgttcaaatgaagatatagatgatgcatcaatttttggaagaggttttggagctgctggtggtcttacaaaagctatagaaaattatcttgctgaaaaaggtattggtgttaattttgaacctgtaaagatttctggttcaagagaaatcaagaaaactatgactatggctaatttaggaaagctagaaggtaattttatagaaggaatgatgtgtgaaggtggttgtataaatggttctggtaaattcttatcaggtgcaaaggttaaagccacttttgatagaaaaaattctcaatcaactaagaaaagtgtcttagcaaatacaaagataaaagattttagtaatataaatttagaaaaataaagataatacaaagcaacaaaaatacatattgttaatagagttgttctaagttgaggtttaacttttggacaactctatttttatttatatatttaattaatgaacaactaaaataaaaattacatatataatattttgtatataacttaacaaagtatatgcctatgttataataatttatagaaataaataaaaaatacaatatacataatagtagaaatatagtaaaaaggtgtgatttatagggaggattacttatgtttgaatttgaaacgcaactaaaaaggttgaaacatgaagttttaacagcagtagcaagactatctattgaagaaaatttaacaaaagaaaatatagaaaaaattccatatgaaataattaaaggagaaaaggcgagatatagatgttgtgtttataaagagagagaagtagttcttgaaagggcgcaacttgcattaagtttaactccaaatagtaaatatggagatataaatccagattcagttagtttggacacagatgagcaaattatatatatagttgaagcagcatgtgatagatgtccaataaatgaatttacagttacagagctttgtagagggtgtttggctcatagatgtaaggaagcatgtaaatttggggcaatttcttatataaatgggagagcatatataaatcatgatttatgtaaggcttgtggaatgtgcaaaagttcatgtcaatatgatgctatatcagaagttgtaagaccttgtaaaagcgtttgtccaacaggagctttggattttaatagaaacactatgaaagcaatgatacatgaagataattgtataaattgtggagcatgtatatcagcatgtccttttggagcaatatctgataagagtttgatagcacctgttgcaaaaaaacttgcaaagaaagaaaatatgtatgcaatagtagctccagctataacaggtcaaatagatagtaatattacatatggtcagttaaaaaatgctataaaatcacttggatttgtagatatgatagaagcttcttgtggagcagatgcagttacagttcatgaaagcaatgagcttattgaaagaataaaatcaggagataattacatgacaaattcatgttgtccgggattttttaagtatatagagaagatgttcccagatgaaaaagatagaatatcatctacagtgtctcctatggtagcaacaggaagattagtaaaaaaaatagattctgatgctaaagttgtatttatagggccatgtacagctaaaaagagtgaggcaacagagaaaagtttaaaagattcagtagattatgtacttacttttgaagaactaatggcattatttgaagcatttaatatagatttatcaaaatgttcaaatgaagatataaatgatggttcgatttttggaaggggatttggagcgtctggtggacttgccaaatcagtacagaactatattgctgaaaagggacttagttttgagtttgaacctataaaagtatctggtccaagacaaattaaaaagacaatgacaatggctaaattgggaagattagaaggtaattttatagaaggaatgatgtgtgaagaaggttgtattaatggagcaggtaagtttttatcaggtgtaaaagctaaaaatacttttgatagaaaaaatggacaatctactaaaaagagtgttttatctaatgataagattaaagaatttgaagatgtaaatttagaaagataattgttttggtacagtcatttttttatcatgccacaaatatgcctaaaattttccctttttatatgtgtattttacagagttaaggttgctatactataaatatgtaataaataaaatttataggagcttttggatgaagaaaatagtattaaaagatatcctgtttttagttactacattatctataatagtaatattattgtttgtaacaaatataactactaatagtaagataaaatcaacaagtgaatcttatttaaaaagtgacaaaaatagtgtgaggcaaaatggtatccagaggagcacaaaaaatactgcatttaagactactatattaagtactggaaagtctgactgtatattaatcgagataggtgataaattcataatgattgatacaggagaagataaaaatggagaacaaatagttgataaattaaaagaaaaagaaataaatgcacttgactatttgattaaaaaatagctacgcacactcgtgcctttagtcatgagttagtagctaaaatagtcagcatatagggaaacctatatgtagagataggatagaacctatccaatactacttgaattgctggaaacccctaaagctaaccaaactaaaacataaggatgaaataaacctaagtgtgaaagttacgaaagtagaaaaaattggttagatggtataaggttaaaccctaagtactttaaaatgggcaatcagcaggtaaactccgaataggagaaacttcaacgactattcctcttgagggaagtacactacaagttatcggtagtggaagtgggtagaccttaacggataatgccgaaggataagatatagtctgtgcttgcatgaaagtgtaagaagttcataagagaactgcataggtagtagcgaacttatgtgaacgacaacctcaaaaatgataaaagttaagacttacggttcttaaatatgttatttaaaattaaatataaaaccttctaaataattgttttaaataattacatttgttaacattattataggtgattaataaattgttcaccacagcattatataatatattaaatgtgataaaatcattaaaaagtgtatcaaaaaacaattaaagtgaggtgatagtagtggaaaaagcttataagtttagaatatatccaaataaaaaacaacaagagttaattaacaaaacttttggatgttgtagatttgtatataataaatatcttgctaaaagaatagatgtttataaaagcgataaagaaacttttacttataaacagtgtagttctgatttgaccaatttaaaaaaagaattaaagtggcttaaggaacctgacaaattttcactacaaaacgccttaaaagatttagataatgcatataaaaaattttttaaagaaaaagcaggatttcctaaatttaaatcaaagaaaattaatagattttcatataaaactaattttacaaatggaaacattatgtattgtggtcaacatataaaactacctaaacttggtatggttaaggtaagggataaacaaatacctcaagggagaatacttaatgctactatatctaaagagccaagtggtagatattatgtatcattatgctgtactgatgtagatattgaagtatttgaaaatactaacaatcagataggtttagatttaggaattaaagaattttgtatctcaagttgtggagaatttatagaaaatcctaagtatcttaagaggtcattaaacaaacttgctaaattacaaagagaattatcgagaaagacaatcggtagtttaaataggaataaagcaagattaaaagttgcaggacttcaagaacatatagccaatcaaagaaatgattttctacaaaaactatctactaaattaataaaagagaatgatattatttgcatagaagatttacaagtaaagaatatgattaaaaatcgtaaactatctcgcttaatttctgatgtgtcatggtcagaatttgttcgtcaattagaatacaaggctaattggcatggtagacaaattgtaaaagtaggcaaattctttgcaagttcacaaatatgcaataaatgtgggtataaaaatgaggaagttaagaacttaaatataagagaatggatttgtcctagttgtaatgaaactcacgatagagatataaatgcaagtataaatatattaaaagaaggattaagactaataacaattcaaaataaataacgtatgtaagaaccgtaggaactacggggatagcctgtggagaattagtaagacatatgttagtatgcaaaattctatgaagcaggaaccctgtgactttagtcataggaggttcagtttaacccatttagataaggaccatataggtggagtagatagtgtgttatctagtgttaaagtaaagaatattatacaagcaaattataagaaagatagtaagcaatatgatgaatatattgactcacttaaaaaagctgatatagaaccagtgctactaaaagataatatgaatattgtaatcaatagtgcagaaataaacatacatccggcttcaaaaagcaagtacgagagttcaaatgattattcaataatcactaatataagctatggagcacataagtttttatttgcaggagatgcagaggaagaaagattgtcagagtttataaatggaaatactttaaaatatgattttgttaaaatgcctcatcatggaagatatgacaaattaactgaaacatttttagagtctacttcaccccaatatgctgttattacatgttcagagaaaaaagaaccagaggaaggtgttttaaaaatattggaaagattgaatataaaaacatttttgacttctagtggagaggtagttatcaatagtgatggtaagacattgagtgtgaatcaataattttttttaaaatatctaaaaaaaatttaaaaaaatcattagcaaatattaccccttaaacatagtatattttaggagctgaaactccacatacaaaatgactaggaggtaacatattatgttggatagattttttggtgaaggcggatttggtggatgtgcttggtggataataatattattcttcttattcttagcattccaagattgttgggctgaaatggacttatgtgcatggatacctttcttaatattattattaatactttgtgaatgtggtgacgtttttgatggaggatgtggatgctaaaaaaatcaatttagatgatttaataaagcttatggtgggtataaataaaataccaaaccaatcacaatctagtgtttgaaggtagtcggaaatcccccgctaccttcttttttttattgttagaatttatttttgaattatttcatttacatataataatttttacaataaagtctgatataattaaaaagaaaataaaatttatttataggagatgtaaaaatggctatagtggataagattttcaatgagataaaacttatggttgcaagacttttattgggaaaaaaatacagtgaatatgaagaaaaagatttagtgtataatacagaagaagaagttatacttataactttaaaaagattagtttttcagggaaatgtaaacgaagcagaagaaattttatttgataaagctaagactgtaactagtgaaaatatgcagtatatagcaatagaattttatactatgcttatggaaaagactgatgaagaattagaagctatgaatttttctaaacaagaagtttatcaaggtatagaagatattagaaaagtattgaatttagaataaaagatatatgaaaatattgaaataaattaatgttaaggtgagaatattatacttatatataaaaatataatattcttattttattagttatattaggtatatcttatttaccataaaactatcttgaaaaaaattaatcttaattgtataatattactttgagtgaaaaagtattaacatttttttataagatgttttactaaaaaaatatatataaatatactgttatcaacaagaaatttaatttagtgaggtgttaagatgaaagtaggatttgaccacaaaaaatatttagaagagcagtctaaatacatcttagaaagagtaaataattttgacaaactttatttagagtttggaggaaaattgatgggagaccttcatgcaaaaagagtacttccaggatttgatgaaaatgcaaagataaaagtattacaacatatgaaagaaaaagttgaagttgtaatttgtgtctatgcaggagatatagaaagaaacaaaataagaggagactttggtatcacttatgatatggaagttttaagattaatagatgatttaagaggttatgaactagatgtaaatagtgtagtaattactagatttgaaggacaacctgctacaactgtatttataaataaattagaacgtagaggaattaaagtttataagcattatccaacaaagggatatccgtcagatgttgagactatagttagtgatgagggatatggagcaaatgaatatatagaaactacaaagccaatagtagtagtcacagcaccaggacctaatagtggaaaacttggtacttgtctaagtcagttgtatcatgaaaataaaagaggtaatgtagttggatattctaagtttgagacattcccagtttggaatgtacctgtaaaacatcctttgaatatagcttatgaagcagctacagttgatttaaaagatgtgaatatgatagattcattccaccttgaaacgtatggtgaaatgtcagtaaactacaatagagatttggaattatttccagtgcttaaaaaaataatagaaaagataactggaaaagaatcaattttccaatctccaactgatatgggtgttaatagagttggctttggaataatagatgatgaagtaataagaaaagcttctatagaagaaataataagaagatactttaaaactgcctgtgagtataaaaagggacaagttgataaaggcgcttatgatagaatgaaaatgattatggaagagcttaacttaaagccagaagatagaaatgttgtattacctgctagaaattacagtaataaattaaaagaaagtgccgacaagaatgatacttgtcctgtagttgcattagaattagaagatggtacaatattaactggtaagggttctgatttaatgaatggaacagcagcagtagtattaaatgccattaaacatttagccaatatatctgatgatatgcacttaatatcacctgtaatattagaacctatcataaacttaaaaacaaagactttagctagtagaaatgtttcacttagttgccaagaggtgttaactgcacttagtatttgtgctgtaactaatccaactgcacagtttgctatggaaaagttagcattattaaaagggtgtcaagctcattctactactatattaaatagagatgatgaacaaacatttagaaagcttggtatagatgtaacttgtgacccagaatatccttcacaaaatctttactatagttaaaattatataaaaaaatatgggctgttttaaagtaatagtttgagcagtccattacaattataataaaatcagtaggctgtcttgtataagacagtcttttgtttttaaaacatcccataaattaaatatatatactgttatccataaggaattttaaatttagttccttggaatacctattgtaaagcttttatatagtttttgcaagtgtttttaaggattttttataaattatattgaagttaatggattatagatggttttatttatggaaaatatgaatatataaagaaaataatgaaaaaataccaaaaagaaacataagtttggtataattaaaaagtaatataaataaaattaatctatttatactttaaaaggtgataataatgaaacattatagaaaaataattcatatagatatggacgctttttatgcatctatagaacaaagagataataaaaaattaaaaggaaaacctgttattgtcggtggaaatccacaaagccgaggtgtggttgcaacgtgttcttatgaagctagaaaatttggtatccattcagctatgccatcagctgtagcttacaataggtgtccatatgcagtttttgtaagacctagatttgatgtttataagagtgtgtcagagcaaataagagatatattttatagatacacggatttagttgaaccattatctttagatgaagcttacttagatgtaacaaaaaataaaaaaaatattgattcatcaattgagatagcaaagcaaataaaaaaagatatatttagagaagttggtcttacttcttcagctggtgtgtcatacaataagtttcttgctaagattgcatcagacttaagaaagccaaatgggttaactgtaataaccgaagaaaatgcccaggactttttagataaattacctgtgaataaattttttggtgttggaaaagttacttcaaatactcttaaaaatttaggtataaaaactggatatgatttaaggtgtttaaatttatttgaacttgaaaatatattcaaaaaaagaggttatgaattatataaatttgctagaggaatagacgatagaccagtggaaccaaatagggttagaaaatctgttggggctgagactacattaagtcataatttggatattgatgaagaagaaacacgcaacattcttgatgaactttgtgaagaagtatgtcatagattaaaaagctctgagaagtttggaaaaacattaacattaaaaattaaatatgaggactttacaaagataactagaagccttagtttagaacactatattgacgaatataatgatataagaagtggtgtagataatttgttgagaaatgttgaggttaatggaaaacaaattaggctattgggagttacaatatcaaacttaagtgataaaaaagaaacttataaagatattacattatttgaatacatggatagtattcaaatgtgagttttgtttaaatgaaataacactagctttaatactatataattgaggctagtgttattttatgaatatttttatactttttgttttttgacattatatactatatataaatactttatatttgtagcaatattcagacaaatagtgacctaaaaatcgtactttgtttacataaataaaatagtatgatataattataaaaacaacttataatattggagaaggttgcttgttcgaaaaaggggatgataaattatgatagagataagaaatgtaacaaaaaaaataggaaataatgttatattagatgatatttctctagttgtagaaacaggtacattggtagttttgattggttcaagtggttgtggaaagactactactttgaagcttataaacaaattaataaaacctacatctggtgagatatatattaatggcaaaccaatttctcaggaaaatgaaatagagcttagaagaaaaataggatatgttatacagaacacaggcctattccctcatcttacaataaaagaaaatatagagctaattccacgcctaaaaaaggaaaaatccgttgaagaaattgaaaaaagaacgttgcaactacttgagatggtaggacttgatagtgatgaatttttgaataagtatccttcagaacttagtggtggacagcaacaaagaattggtgttgcaagagccattgctactgatgctgaaataatattgatggatgagccttttagtgctttagacccaataacgagaacatctttacaagaacaattattttctcttcaagatgaattgaaaaaaactataatatttgtaacgcatgatatggatgaggctttaaagatagctgataaaatttgtattatgaaggatggaagaatagcacaatatgatactcccgaaaatatacttagaaagcctgcaaatgactttgtaaaagattttatcggagaagatagagtttgggataatccagaatatataaaagcaagagatattatgataaaaaatcctattgctgttaattccactagaactgtaactcaaggaatagaaattatgagaacgagtaaggttgatagcttactaattatagatagagcaaaaacattaaaaggtattgttactgtaaaagatatgaaagatattgatgataagtcaatattacttgctgatattatgtcgagtgagcctttgcatgtaaatgaaggtgataatttagtagaaatactaaatgtaatgaatcgtaattcggttggatatattccggttatttctgatgaaaataaactggtagggcttattactagaagtagtttactttctgttttaagtgaacaattcttagaaatggaggtgagtgttcttggctaatttttttaactttatactattacaaaaagataagattatagagcttttaatacaacatatgagtctaactgttacatctattttaatagctataatagttggtgttcctcttggaataattatttcaagaatctcatctcttagaaagtttgtacttggatttgtaaacttagtccaagcagttccgtctatggcacttttgggtcttcttgtacctatacttggcataggaagtaaaccagccatatttatggtagtggtttattcattactaccaattgtaaaaaatacgtatataggtataacaagtattgacccagtagtattagaatcagctaaaggtattggtcttacaagaaatcagacattatttaaaatacaattccctttagcacttcctataataatgggtggagttagaatatctgcagttacagctgttggtttgatgactcttgcagcatttataggtgctggtggtttaggatatttagtattttcaggggttcaaactgtaaataataatatgattttagcaggggcaatcccatcatgtataattgcactgttagttgattatttatttagtaaaattgaagttgcagttactccaaaaggattaaatccaaaagcacctaagaaaaattatatagcacttaaagtaatatctgtagtggttgttgtttcaatgttgttcgttgtttttagttctagtttttcaagtaaaaaagatacaataactattggttctaaagattatacagaacaacttatacttggtaatgtttatgctgaattagtagaaaaaaatacgaatcttaaagttaagaagaatttaaatctaggtggttcatctgttgcgtttaatgcaattaaatctggtgagttagacatgtatgttgactatacaggtacacttttggtaaatgtaatgaaacatgctccgattaaagatgctgatgaagcatataatgttgtaaaagatactatggaaaaagaaaatcagttaactttacttgaccctcttggatttaataatacttacacattagctatgatgcctgaaactgctgaaaagtatggaataaatactatttctgatttgactaaatatggtaaagaatttacattctcaccaactttggagtttgaaaatagagaagatggtcttgtagggctttctagagattatggtttaaaattcaaagatgtaaaagcaatgaatggaagtttaagatatacagctttagataataatgaatctcaggttatagatgcatttttaactgatggtcttattaaaaagtttaatcttaagatattagaggacgataaaaatttctttgtaccatattatgcagcaccattagtaagagaagatactttgaagaaatatcctgagttagaaaaagttatgaatatgctttcaggaaaaataaatgaagaaactatgagagaacttaactatcaagtggatgaacttggtaaatcaccagaagaagttgctcattcattcttagttaaagaaggcttagtataaaaaattaatagtttatatcaaaaatttaagggagtgtctcaaaatgaactttttagttcatgaggcactcttttttatatgaaatcaaatatattttatcatttcaacaataaaaaagaagcttatctttattttgagacagtctcttatttttatgtataccaaaaccatacctacgatttttatttataattaagtttcaaatagaatgaacaagtacaaccaattttgaatataaatatagtaaatgtgcttatatacgattttattatctgggtgattgatattgatagatagctttctttattgaatcgaagggagggggaatttgttatggataactataagaaagtgaagcaagtattgtggataattttatttgctaattttgcagtagcattattaaaaatcattattggtaatcaaataaaaagctatagtatgacagcagacggatttcattctttgtcagatggagcatctaatatagtggggcttataggtattttctttgcatctaaaccaaaagataaaaatcatccttatggacataaaaagtttgaaattataaccagtttatttataagtggtatgttgtttgttatagcaattaagataattcttagtgcagtgctaagaatagctaatccagttgtacctgctataactatagaaagtttaattgctttaattattacactttttataaatatttttgtatgcatgtatgaatatagaattgggactaaactaaatagttatgttttaatttcggattcattgcatacaagaagtgatatatttgtgtctctaggtgtattggttactttagttggtgttaagttaggatttccagtaataatagaatctatagttcctattattatttctgcattcataatttattcggcttatggaatatttaggccatctattggaattttggtcgatagagtggctgtagatgaggattatataaaagaaattgtgtttgaatttaatgaggtaagggatgttcacaatatcagaagtagaggtagcaaaagttctatttatattgacatgcatgtaatggtagacccatttataagcgtagagcaatctcatgatttaacacataaaattgagaaacaaatacaagaagaaattaatgaaaatgctcaagtaatagtccatattgaacctttttatagtttttaacttagctataaaatacaagttataaaaaaatataatttataaaaaaaatattataccataaataatttataaaaattatttatggtataatattttctataaagaaattaagtcttaatatatctaaggaggaatttacaatgagatacgttgaatatggaaagacagggaaaatggtttcagtagttggctatggaggattaaggtttgatttagaaaaaagtaatcaagaaaatgctgatttagtcaaatatgcgtatgaaaaaggtattaattactttgatacagcgccagggtattgtgatgacagaagtgaagatatatttggactagcctttagacaaatgataaaggaaggtaagaccgatttttatgtatcaactaaagaaaagccaaaagcatgtgatacatcagaaaaagctatagaggctgtaaaaaaatcaatagaacgattaggcgtatctaaaataaatttttatcatgtttggaatattagaaagatggaacattacgaactagcaatgagacctggaggtcaatatgaaggattattgaaatgtaaagaagaaggattgatagaccatatagtattttcatctcatcaaccaggagatgaggttatagatattctaagtgaaaataagtttgaaggtgtaactatgggaataaatatattaaactttccatataggctaaaaggtgccaaatatgctgttgataatggatatggtgttgtggcaatgaatccattaagtggtggaactattccaaagtataataaagaactttcttttctatcaaaagatggcgaaagtactatagaatcagctttaagattcaacataggaatttcacaaataagtatatctttgatagggtttaataaaaaacaagatatagatgatgcatgtaaaattgcagacgaaaatagaatttattcagatgaggatatacatgatattgagactagattaaataagaatatgaacgaaatatgtacaggttgtggttattgtaaagtatgtccaaaaggtattaataccccagcctatatgcttttttataatgaaaagcagatgtttaaaaagagtgatgaagaaatgacaaagttagtttatggtttaggacattggaattacacaatgaatagtaaggcaaaagctaaagaatgtatatcttgtggaaaatgtgaagttgaatgtactcagcatttacctataatagatagattaaaagaaattaaaaaatgggaagaagatggagctaatagtgttaaagtctaattaattttatactatatttgaaatttgtatagtatttagtaatgttttaaaatatagttttaatatttaaggagacagattataattttgtctccttaaattatgctttaatttgttatagtttaattccataagcaacattgtatatttttatataaagtttttcaaatattttacattaatattgcttacaaattctcattttatacaacactaatctatgttatataaacaatacttgactgattataacatcaataaagtaaatattgtggttgtaaataaagagttattcaattacaataaaacaagtaagaacattatgaagatggctattaaatataaggaataaattgtaggtgtcagcaaatcctatataatgaatggatggtgatatattgatgagtaaaatattaaaatataaaaacgagatgtttttgtttatattagttgtaataacttacttaataataactaagatatttttttctaagactactatattttataatttaaacaatacttatgatgtattgttagatacagatacaggggttttattcaatttaaatgtatttgctataagtcaagacaatagtaagcacatattgttttcagcaattatatcaatttttgcatatccaatatacctattttgtacttcaatagcaaatcctgggacaacagattttaatagtgcctatgggtttggactaatttgtctacaaataataactagtgctatgtcaataactttagtctttaatcatattaaaaagataaaaatgcagagattaactttaattttacttactatgataatgatattttcttttccacagttatttatgactttaaatgtagagagatttatatatagccaattttcattaatatttttcatagttattgcaaataagatgaaaggaaaaaattcttatttagtagaattagcagctattcctctatttggaataactattagtaatatatatttgtatttttttaatatgatatttgagtttaaattaaaaataggaaaaatgttaaaacatttaattacatttatcctaatggcatatatttgtgtagtttcaacgaagtcttatgagagttttatgaaccttggaaatgtaatacagtatgatacgaaatttataagtggagaaccaattttggaaaagattgcaatgattatagagagattattgtattcggttttttattttcctggagcaagtattaaaaaagggttatttttgcaaaatggagaagttgctacaataccagtaattcttacattattagctttatgtttttgtgttttatcagttattgaaaattcagaaaaaagagttcctaagctatgtatgggaataattatattcaatctaactttacatggtatagtaggatataatctagtcaattcaagtattatggctataaattttagttttgcagttataattttattggcttactttacgaaagcgcttagaaaaaatgaaaagaatatgtataatatatttctatcgctgttattggttactatagtaatcagtaatgtcaatggatttatagaaattttaaacatagggataaaatcatatcctgtttaaaaaataatattgaaagggtagtaagtttatgaaacagaccaatacaagtataaggcttcttactaaaatttcagattatataaagttaatgagaataaagcaatatataaagaatttctttgtattttcagctataattttttcaaacaacatactaaatataaatttatttttaaatacgtttattgcgtttgtgtgtttttgcctaatgtcatcatcagtatatgcactgaatgatgctatagacatggataaagataaaaaacatcctaaaaaatgtaatagaccagtggcaagtggaagaataagcaaaaaaagtgctaatatactatttgtagtattagctttaatttcagtctgtttatcaacagttgttagttttaatctttctataattcttagtctctatttgataaacaatatattatattctcttaaactaaagaatataatactattagatgtgttttcaatatctcttggttttatacttagggtttatgcaggatgtgtagccataagtgttagtttatcaaattggataattttatgtacatttttcttatctctgtacttagctcttggaaaacgtaaaaaagaaatagaaactctaagagatgatgcagttgaacatagaaaaatattggaagattatgacatagaaaatctaaatcaaatgatgatagttatattaagttctacaattgtatgttattcattgtattctacaagtaatccagaaaagccacatatgatatttacaacaatatttgtagtttatggtgtacttagatataattatataattaacactacaaatgaaaataatcctactgatattgtcctaaaagataatgctttaaaaataaacgtaatcttatggataattacatgtttaataatattgattttttagtgatatttttagtgataggatggggaaatacttatgaaaaaaagtgtattattacttgatgtagattatactgttataaatactgatagcatgatagatttttttatttactctttaaaaaataaaacctttaaaactattataaagttgccatacattatttttattctatttatgtatttaattagaatgatacccttgaagaaggcaaaagaggcaatcttttatccaatagtagattttagtgaagaagatttaaaaaagttttttgatgattgcataatgaaaaaaattaacgaatctatgaaaaaggtcatttacaaaaataaagaagaagataatgttataattatgataactgcatctccatatgcatatatgaaatattttaagtattatggtcttgcagacaaggttataggcacggagtttttttatgaaaattcaagatataaaaatcaattcattggagaaaactgtaagggaattgaaaaagtaaaaagaataaaggctgtattaggtaaacttgggatagagattgattatgaaaattcatatgcatattcagactctaagagtgatttaccaatgctttcattgactaaaaatgcatttttagttagtaaaaaggatggtgaggttatagagcaaataaattcataacttaatgtcacttagaataggagggaatagtttgggatatttacacatattaattttatctatggttcctgtaacagaattgaggggagccattcctataggtattgcaatgggcttaaatcctatatgggtttatgtatttagtgtaataggttctacattggtatcgattcccttgatattgacattcagacatgtattacaatttttaagagggaagaaactatttaaagggattgctgatgtaattgatagaaaaataaactcaagaatgaagaaattaaaaagtgtttcgataattggtataatactatttgtaggtataccactgccaactacaggaacatggactgcatctgctatagcttccatattaaaaatgagaataaaagatgcttttatgggagtatttcttggcaatttgttatcaggggttatagtttcagctctttctttacatataatataaaactatctaagtaatatacttggatagtttttttatgagtacatgtgaaaaatttttaataataaataaaaaatgagataaagtatttaaattcagttagttctaaaatgtttactatggcaaaagaaatatagtatagtattacttgtagggaaagtactctaaatttgtctgctgataaaatgaaatttttatatagaataaaattttagtgatacattttaattattggattgaggaggttttaaaatggaaaattcaaacactaacttaggcagtgaaagtgtgggtaaattattatttaaacttgctacacctgctattattgcacaaattgtaaatgttttatacaacatagtcgataggatttttattggtagaatggaaaatggagaagttgctatggctggtgttggagtggcctttccaataataattataataactgcatgtagttatttaatcggtatgggaggaggtccattagctgctataaaaatgggtgagcaaaacaatgatgaggcagagaaaataatgagtaacagtttttctgtactggtgattttagcaatacttttgactataggttttaagattggaaaagagcctttactttggatgtttggagcaagtgaatctacaattagatattcaatggactatttaaatatttatttaataggtacagtgtttgttcagatttcaatgggtatgaatacttttataaatacccaagggtttgctacaactggaatgatgacagttgctataggtgctttaataaacataatacttgacccgatttttatatttggctttaatatgggtgtaaaaggagctgcattagctactataattgcacaaggcgtttctgctatttgggtacttatgtttctctttggaaagaaaagtatacttaaaataaaaaagaagtatatgataccaaaagcaagtatcatcttaccagtgcttggcttgggaatctctccatttataatgcaatctacagaaagtttagtacttatagccttaaatagtaaattacaaatgtatggaggagatttagcagtaggttcaatggccataatgagcagtataatgcaaattcttatgcttcctaatatgggggttacacaaggagcacaaccaataataagttataattatggttcaggtcaacttgatagagtaaaaaagacatttaagttgtgtttattgtcatgttttacatattctactattttatggcttttattaatgatatttcctgcattttttgttagtatatttaataagaatccgcagttacttagtatgactagttggagtataaaaatatattttgctggtgcttttatgtttgggattcaaatagcttgtcaacagacatttttagcacttggaaaagcaacaatatctttggttttagctctacttagaaagattgtacttttaatacctttaatatttatactcccaacattctttaatgaaaaactttttgcagtaattttagcagagccagttgcagatataacagctgctactataacagcaatttctttctttatattttataaatgttttctatcaaaacctaaagcaataaaagaataagatatacaatataaattttttatgaaaatattttattagataaaaattagaatttgtattttaatttaataagatattttctataatgtataaatatatgaagttgaatttattttaaaaattatagtaagaaaaatgtaagtatttgcaatattaatggtataatatttacagatatgataatcaataagaggaaaggatgtttataatggaaaatgatttaacaatgcaagaattacttgaccagcaagaacaagtattcagcaaagtgaaagttggagaattgacaactggaaaaataactgcagtgagaaatgatgaagtacaattaggattagactatgggtttgatggaataatacctataagtgaattgaacatagaaaaaaatcaatatatagaagatatataccacataggtgatgaaataactgctgtaataacaaaagtatctcaaaaagatggtacaataactttatctaaattacaacttgacaaaagaaatgattttgccgagttacaaaaggcttatgatgaacatagaataataactgtaaatgttgaaaagaatatagataaaggtgtatttgctaattacaatacatatacattttttataccaatttctcaacttgatacaaaatttattacagatacatctaaatttgttggtcttaacttagaagtttatataaaagaattggatgttagaaaaaatagacttgtagcatctcatagagatgtattacaagagcgtataaataaagagagagaagaaagaagagctcaaattaaggcagaaaaagaagctgaaagagcaagaattaagcaagaaagagaagaagaaaaagctcgtatcaaagcagctaaagaagacttatttaattctcttgaagttggacaaaaaagagatggtaaggtgacaaagataatgccttatggtgcatttgtggatattggtgggattgaaggattagcacatataaataatttagcttggacaagagttgaaagtgttgaagatgttgtttcagagggacaagaagtagaagtttatgtgttggatgtaaataaagagactaaaaaaattgccttggcattaaaagacataaataatgacccttgggatttaatagcaaaagaagtacaaattgatgatgttgtcaatgctaaagttcttagaataatagaaaaaggggcttttgttcaaattaaagaaggtgtagatgcgtatttaccaatatctgaattgagtgatactagagtggctaaagttactaatgttgttaatattggagatgaggttaaagttaagattcttgattttaaaccaaagactaaaagaatgttggtttcaataaaagaagcaactagagagccagaagaggatataacagaatacctagaagtagaggaatctttaggaagtattggagaattatttaaagataaatttaaagatttagaagtgtaaaataattgaaaatggggctgttttaaaacgttacactgtctattatgacagctttagttttgaaatagccctttagctattttcacgaatttatgtaaaatattaggaggaaatttaatgaaaaagtctattatggatgtacattgtcacactctaataagtggacatgcacatagtactttcaaggaaaatgtcgaagaggcgagtaagaagaatataaaatacttaggaatatcagaccacggacctaatatgccaggaggaccacatccattctatttttataatttgcatttgcttccacgtgaagtgcaaggtgtaaagattcttaggggaatagaaggaaatataatggattatagtggtaatttagatgttcaagaagatatgttgcaacatttggattatataatcgcaagtttgcatagaccttgtatagcttctggtacaaaagaagaaaatacaaatgctattttaaaagttatggataaacctaaggtaaaaataattggacatccagatgacagtaggtatcctttagattatgaacctatagtaaaaaaagctaaagataaaaatatccttttagaaataaataattcatcattaagttcaaactctcatagaacgggtacttgggaaaatgtaagtcatatgttgacattgtgtaaaacatatggtacaagagtaattcttggtactgactctcatatatgttattctataggagaatttgaaaatgcagaaaaagttttagaagcagtagattttccagatgaattagtcataaattatcatgaagatgaaattatagaattttttgatataaatttttagaatcttgggagtgaaaaaatttgagtaaaaataagtttatctatatgaattattatgacaatggttattttaaaaaaggaatgactatatatatggttttagcacttataattttagctacaatttttatatattcaacgacaatattatatattttatgtataataacagcagtttttctatttaaacaaggtcgtgatttttcaaataaatatgagggaaaagtatatattactctcgataatcattcaatattaataaataatcaatgtatattcagtataaaatctaaacaaagtcaaaagtttaattataagataatagaaaaaatagaagtagtaaaaaatatattaaatatatacactgacgaatctaattataaaattagattaagggcattgagtttggaagatgaaaaaaaattattgaatatcatagatgaaaagatgaaaaagtttaaggcataatatcatactgttttcaatagttagcatgttttatagaattgcttatcaaaaataaaaaattgagataattattttttttgttgacaatacattttaatgtgtatataataactattaaatcaaaatatttagaaaatttaaatgattaaaaaagtgatgaatagaagtagtaagaacaatgaaactttcagagagctaaaggatggtgtgatttagtagttgatagttctgaacttgtctaggagctgttttctaagatttaaatcttagaataatcggagtaattccacgttataggaaatatagtcattataattattgtattggctattactaagggagctttttagaaagctaaatagagtggtaccgcgagcaaaacctcgtctctaattttattagagatgaggttttttttattctaatgataaaattgacatttatccttatgaagtgtgcaggattgcgtcgatataaggtatactgaatacaaaaaacagaaaaagggggaaataacatgaagtgtggaaagtataaaaaatatgataaaatgcaaatagtaaatcgtaaatggccagataatgaaatatttaaggctccaatttggtgtagtgtcgatttaagagacggaaatcagtcactgccaacgcctatgagtgtaaatgaaaaagtcagaatgttcaaaatgcttattgatacaggatttaaagaaatagaggtaggatttccatcagcatcaaatacagagtatacatttttaagaaaattaatagatgagaatatgattccagatgatgtaactatacaagtacttacacaatctagggctcatcttatagaaaaaacatttgaatcaataaagggatgtaaaaaagcaattatacatttatataactctacatctgttcttcaaagagatgtggtttttaatatgagtaaacaagaaataatagatatagcagttgaaggagcaaaattatttaatgaagaagtaaaaaaatatccagaaacagaatttacttttgaatattcaccagagagttttacaggaacagagatggattatgcacttgaaatatgtgaggcagtgatagatgtttggaaaccaactcctcaaaaaaaagtaataataaatcttccatcaacagtggaaatggcaacaccaaacgtatatgcagaccaaatagaatggttttgtaaaaatataagttgtagggattctattatactaagtttgcatactcacaatgatagaggaacttgtacggctgcaagtgaacttggattattggctggtgccgatagacttgaaggaacactatttggaaatggtgaaagaactggaaatatggatatagtaaatgtgggacttaatctttatacacaaggaatagacccagagctagattttagcaatatagataagataattggtatatatgaagactgtacaaaacttatggtacatgatagacatccatatgcaggtaatcttgtacattgtgctttttcaggttcacatcaagatgctattagaaaaggcatgatagcaatgaaaaacagagataatgattactgggaagttccatatttaccaatagaccctcatgatattggaagagaatacaaagaaattataaggataaatagccaatctggaaaaggaggagctgtttatataatggaaacagattatggatttatgatacctaagaatatgcattctgattttggaaatgtagtcaaaatggaatctgatagaattggggaagaacttagtagtgaagcaatatttaatttatttaagaaagaatatattgaagttgagagcccttataaagttaagaagtataaaataaaatcaatggatgaattaaactatgaaaatgatgattctaatgatactaacatgattgagatgactgcaagaataagttatatgggaaatgaacaaaggattgttggtataggaaatggacctgtagattcatttaataatgcactaaagcaatgtggcatgaaagattataaatttagatattactgggaacatgcattagaggaagggtcacattcaagaggggtagcttatgtaggaatagagcacaataatgaagtctattttggtgtaagtatatcggaaaacataaatacagcagctattaatgcacttatgaatgcaataaataaaagttatattgaggaggaaataaaaaatggggatgactatgacgcagaaaatattagccaaacatgctaaattaaatgaagttaagaaagggcaattaatcgaagcagatttagatgtagttttaggtaatgatataacatcaccagtagccattagagaatttgaaaaattaggaattgaagatgtttatgataagactaaagtagtgatggttttagaccactttacacctaataaagatataaagagtgcagaacaatgtaaatttacaagaagtttcgcaaaatcaaaaggagttgtaaatttttttgatgtaggagatatgggaatagagcatgttcttcttcctgaaaaaggtatagtaactgctggagatgtaattataggtgctgactctcatacttgcacatatggagcattaggagcattttctactggtgtaggttcaactgatatgggagcaggtatggctacaggaaaatgttggtttaaggttcctggagcaataaaatttgttttgaagaataaaccaaataaatggataagtggtaaagatataatacttcatataataggggagataggtgttgatggagcactttacaagtcgatggaattttgtggagatggagtagaatacttatctatggatgatagatttactatttgtaatatggcaatagaagcaggagcaaaaaatggaatctttccagtagacgataagactatggaatatataaattcacataagtgttcaactataacaaaagatgtaaatatatatgaagcagatgaagatgcagtctatgatgaagtatacgaaatagatttagccgaactaaaagaaacagtagcctttcctcatcttcctgaaaatactagaacagtagatgagatagataaggatataaagatagaccaagttgtaataggttcttgtacaaatggaagaatatcagaccttgaagtagtagctgagataatgaaaggcaaaaaagtagcagatggagttagagttatgatatttcctggaactcaaaaagtatatcttgaagctatagaaaaagggtatattaccacttttatagaggcaggagcagcagtttctacaccaacttgtggtccatgtctagggggacatatgggtatacttgcagcaggagaaaaatccatttcaacaacaaataggaatttcgtaggaagaatggggcatgttgattcagaggtgtatcttgcaagcccagctgtagcagcagcatcagctataactggaaaaatatcaaaaccatcagaaataatttaagggaggtaaaatttatgattgccaatggaagtgtttttaaattcggtgacaatatagatacagatgtaataataccagctagatatttaaatatagctgattataaagaactagcaacgcattgtatggaggatattgatgataaatttatttctaaggtaaaaaaaggagatattatagttgcaactaaaaactttggttgtggttcatcaagagaacatgcaccaattgtaataaaagaaagtggagtatcctgtgtgattgcttctacttttgctagaatattttttagaaactctataaatatagggcttcctatacttgaatgtgaagaagctgccaataacatagatgaaggggataatatagaagtagatttttctacaggtgtgataaaaaatataacaaaagaaaaagaatataaagcagaaccatttcctgagtttatgcaaaatattatattaaatgaaggcttaattaactcaataaaagcaaatagggggtagtggagtatgaattgtaatatagcagtcataaaaggtgatggtgttggaccggaaattatagatgaaggtataaaggttctaaataaaatttgttgtaaatttaatcatagattcgattgtgaatatgtattagctggaggatgcgcgattgatgaaattggagaacctctacctaataaaactgttgaaacttgtcgaaaaaacgaagctgtattgcttggtgctgttggaggaccaaagtgggataaatgtaagggagataaaagaccagagtctggtcttttaaaattaagagagtcattgggtttatttgcaaatttaagaccagctacaatgtatgaaagtataaaagaagcttcaccacttagaacggatatagttgagaaaggcattgattttgttgttgtaagagaattaacagggggcatttattttggagaacgtggaagaaaaatcattgatggtatcgaaaatgcttatgatgtagaaatatataacgaaaatgaaataagaagaattggtaagagagcttttgaaatagccagaaatagaaataaaaaacttataagtgtagataaggcaaatgtgcttgagagttcaagactttggagaagtataatggaagacttagctaaagagtttgaggatgtagaactgtcacatatgtatgttgataatgctgctatgcaagttgtaaaagaccctagccaatttgatgtaatagtgactaataatatatttggagatataatatctgatgaagcatctatgattacgggttctataggtatgttaccatcagcatcacttagagaagatagttttggtatgtatgaaccaatacatggaagtgcgcctgatatagctggaaaagatattgtaaatccaattgcaactattctatctgtaagcatgatgttaagacatagttttaacttagaagaagaagctaagtgtattgaagatgctgtacaaagtgtactcaataaaggttatagaactattgatatctataatggtgtgggaaatgttgtaggaacaagagcaatgggcgaattaatagtaaatgaaatttagaattatagtttaatttgaataatataatttaaatatataacttgtagaattagtaaaaatctattgtagtataatttgttttatgaggggtgtctcaaaataaactttattagttaatgagacactcttttttatattaagtcaaatatatttttactattttaatagcgaaaaagaggcttatatctactttgagtttctattttgataaagttattttttggaaaataatactttaaattaaacttatcatattgaagtagcctatttttattattagaagtttgcagggattttattaatattatataatatattttagaattatttaatattaagcgactactaatgtcggttaggagatggattttttggcaaagtataaagttttgaagaagcaaaatagtagtaaatcttgtttagtttgtggaacacaaaatgagctaggacttaaagcagatttttatgaacttgaaaatggagagcttgtatcaatttgtaatacaaaggattggcatcaaagttatcctgggagagttcatggaggtatgtctgctgcaatattagatgagactattggaagagctgtaagtataaatgatgaccaaatatggggagtaacagtatctttagagttgaaatataagaaaccagtaccaacagatgctactataaaagttgttggaagaataactaaagaaaacagaaaattatttgaaggtacaggagaaataattctaccaaatggagatatagcagtgacagcaactggaaagtatatgaaaatgcctattggacaaattgcagaaggtgatttttctaatgaagaatggttttttgaagaatcgaaagaaaaagtggaatatattgaactttgattaaataaaaattttatattttaaaacataaattttatatttagaaaaaataaaattcaaaaatacaataaaaatacaagataaaaataaattagttatactaaaaagatttatcgtaatagcgtcaaatttacatactaaaaaaattaatttatatagataaaaagtatattttttttgagagaataattcagaaaattcagacttatgaaaaggcagaaaatgaatgttttcataaaatatataaaataaattatatataaaaaataaattttatgttgacatagttaattcagcttgatattatagttattaaaaataaggacagtaaaaacgctatccatattacaaactaaaaaggggggaattataatgagtaagaaattatttattcctggtcctattgatgttaaagaagaagtcttgcaaaagatggctacaccaatgataggacatagaggaaaagatgcatctatgctccaaaagagtataagtgaaaagatgcaaaaactattctatacaaacaacacgatacttttatccacgtcatccggaactggtttaatggaaggctccattcgttcctgtacatccaaaaaggcagcagtattttcctgtggatcctttggtgatagatggtacaaaatggcagtggctaataatgtcccagcggatatatttaaagttgaattaggagaggcaacaacgccagaaatggttgataaggtgctttctaccggagaatacgatttaataactgtaactcacaatgaaacttcaactggaataagaaatccaatagaagaaattggagaagttgttaaaaagtatgaagatgtaatctactgtgtagatactgtaagttcagccggtggaataaaagtcgaggttgataagattggaatagatatttgtataacatcagtacaaaaagcactgggattaccaccaggaatgtctatttgcacattttctcaaaaagcaatcgatagagctaagcaagtaccttttagaggagtatatcttgatttgttagcaatgtatgaatacttaatcaagaaaaactaccaatacccttcaacaccatctctttctcacatgttcgctttagatttccaattagataatatattagatgaaggcctagataacagattcaacagacatgaagacatggcaaacttagttagaaactgggctaaaaaacacttccaaatttttaccaatgaaaatcacttatccaatacacttactgttatagaaaatactcaaggtattagtgtatcaaatttaaattcaaaattacaagaacgaggattccaaatagcaaatggctatggagatttaaaagaaaaaacttttagaatttcacatatgggtgactatactgtcgaagatgtacaagaattattagataatattgatgatatattaggttttaataaataatattgtaaaaatatgtatgttttaagataaatttagaatatataataaataatattttataaaaattacatattaaatttttaacaaacaataggaaaatttgatatgactttaataaaaaaatattttgaaaattatataaacagaaagttaaattaagtaaagttttttattgatgaaaatactttaaaaaataaaaattggaaaaattaagtgaataaaaattggaggagtttgttatgtataatatattagttactgatggaatagagaaagaagcagcgagaaaattgagagagttagattttaatgtgatagagcagttttatgaaaaagatgttttaggagataaacttaaagatgttgatgtacttgtagtacgttcagctactaaagttactaaagatgtaatagataaagcattagagggtaaaaagttgaagttgatagtaagaggtggagtaggtctggataatatagatgttaaatatgctcaagctaatggcataaaagttatgaatactccaaatgcaagcagtatatctgttgcagagcttacaataggtcaattatttgttcttgcaagattcataaatactgcaaatgtaactatgagagatggaaaatgggagaagaagaagtataaaggtacagaaattaatggaaagacacttggacttataggttttggaagaattgcaaaagaagttgcaaagagagcagaattattaggtatgaatgttatatatactgacataatgggtgaggcgcaaggttttaacaattataaattctgtgatatggaagaagttttagaaaatgcagatttcttatctttacacataccatttgataagaataagggggcagtaataactgaaaaagaaataaataagatgaagaaaggggcttatttaataaactgtgcaagaggcggtttagttgatgaaaaagatttactaaaagcattagatgaaggtaaattatcagcagctgctatagatgtttatgaacaagaacctacattaaatttagacttagtaaatcatccaagagtttctcctacacctcatattggggcatctacagtagaagctcaagaaagaataggagacgaaatagtaaatgtgattcaagatttctttcttgacttcaacaatctaataggggtagcattataaaatattttgtataattaggaggaaattagtaatggcaacgattaaaccatttaaggcgattagaccaaataaatatatagtagataaagtagcagcacttccttacgatgttatgaatagtaaagaagctagaagaattgcagaagggaatccatattcatttttgcatatagataaatcagaaattgatttagatgaaaatatagatttatatgatgaaaaagtttatttaaaagcgcgagaaaatttatatgagtttcgaaaacaagaaattctagtaaaagatgacaaagagtgtatatatatatataaacaaatcatggatggtagagctcaagttggtatagtagcatgtatatcagttgatgaaagcttgaatggaacaataaaaaaacatgagtacactcgaccagaaaaggaaattgatagaactaaacacataaaatactgtgatgctaatacgggaactatacttgtaacttacaaacatcaaagggtgatagatgatataatcaatgattttatggataataatgaacctttatatgatttcataacagatgacaagatagagcatacagtatggaagattgatagtgatgatataatagataacctagtagataaatttgaaaaattagattatctatacattgcagatggtcatcataggacagcttcagcagaaaatgtagccaaagaaatgagagctaaaaatccaaattatactggcaaagaagaatttaattacttcatagcaatgattgcaccagatgagaatttaatggttttggattataatagggttatcaaagacttaaatggtttaagcgaggaagaatttataaataaaataaaagaaaattttgaactagaagaaatagaaggaaaagaaaaatataaacctgacaaaaaaggaactttcggaatgtacctaggtgataagtggtataaaatgaaagcaaataaaaatttattagaaatagaagaccctgttgactcattagacatttctatattacaagactatgttattgatgctattttaggaattgacaatcctagagtagataaaagaattgattttatcggtggaattagaggtcttgaagaattagaaaaaagagttaatgaagatatgaaagtagcatttgcaatgtatcctactagtattgaagatttaataagagtagcagatgcaaataagataatgccagctaagtcaacatggtttgaacctaaagtaagatgtgggctattcttacatgaaataaatgaataattaataaagggctaaaaagtgtacaattcactttttagcccttgtttttttgattgaaaatcgtatgtggaatataaattctataagttgatattcttaataatagttacctttttttagaaatggataattttaggatatagatagtcatattctatgctataattgaggatgaaaattcatataattgtatttgtatatttataaggttttaaatatgtatttataatagtattgttatatattttattataattataaaaaagttaataaaaaaagtgattttgaaatttatattttatttttataaatataattattatatttataaaaataaaatagtaaaaggatattataatattttactagaattattatctggtaacttaagttttgagtattaatctaaaatatatgtttttatagggtttaaattttatgtatacaaaattaatttgctaactgaatcatataaaaaaaacaaaatattttttagagggaatgattagatactattttctttgttatgaaattaattgaagagtaattaattagaaaaggaataaataataatgaatatattacattattactttttgataaatcaaaaataaagttatagtttttaatattaattaagaatgatgaaatatgaataaagattttacaaataaatcttaagctatcttatttaattctaatgcaggaagaaggtaaatgtatattgaaaaaatcatagaaatagaagtaaacaacttaaacaaatacaaaggtttgcaaaagaagtaatataattatatacaatgaggatgtgagtatgatgaacagactaaagccaagaattttaggtattagtatcttgtttattattataattattttaacatgtggagctgttttcaagtttaaatttaaattagataataaattaaaagaaaccacacatacatatttgtctgagtttacagaacacaatataattaatctcaagacaagacttagtggtcaatttgacatgcttgaatctattgctaacttcataggaaacttgaataatataaataatgaaatggtgattgctttaatggattctgatgtaaagcgaagttctttaattagaatgactatctctacattagatggggaatgttattctaatgatggaatcacccataatgttcaagatagagattattttaaaaaagctaaaaatggagaaaagaatatttcagagcctttaaaatctattgttaataataaagaaataatagttttatctaccccagtttataaaagtgggaaaatagttggtgttttaagtggaatttatgattcaaaaaagttaaatgagttattaggattatctgcatttgatgaaaaagcagatgtttttgttgcaaagaaaaatggagatatagttgctcaaaaaacaaataaaaatagaaagacgatatcatgtatatttcagctttttgacaaagataattgtgatgaagatgattgtctaaaaactataaaagaaaatatgaaaaatgataagtctggatattttaattataacttagataatgaaaaatttatgttaaactatcagccacttggagttaatgattggtatgttttttctgttgtgccaaataaaatagtgtctattcagtcagagaatatatcttatgatgtatatatttttgcattagaaatactactagttatattgatttttataatatatatagcatgtattataaataataacaccaaaattattataaatgaaaaagaaaaatttaaagtactcactgataatatattaggaggggttaaaacctgtttaaaagatgaatatatgactatgacatatgtaagtcaggggtttttagagcttacaggttactcttgtgaagatttaaataaaatatttaaaaatagatttaaagacatgatttataaagatgatttagacaagtttaattgtattattctaaatcaattagaaaaacaagataaaattgaagttgaatatagaattgtaagaaaagatggaagtataatttggattttggagagaagtaagtctataaatgataataaaggaagtgagtgtattcagggagttttaactgatataacagaacttaagaaaatacaagaagagttagattcaaaaagatttgaaatacaggctatcaatgatagtattgttggtggaatagtgataactgagataaatgatgattttgatagtatatatttaaatgaaggttatttaaatatgattggatatacacgcaaacaactggaagatgagctaaataataaattaatcaaacttatttttaaagatgatagaacagaattaattaatagtataaacaaacaactcaaattaagtgatacatttgcatctgaacaaagagttgaaaaaagggatggtactattatatggattttattaaaaggaagaaagataatttatgataatggaaaatctgtactttgttgtgttattgtagatatcacttctgctaaattattagagcaagaacttaaaaagagtgaagaacgtcatgaaatcattctaaagcagacgcaaaatatcataatagaatgggatatagaaaaagataaaatgaatatatcacctaattggtataataagtttaaatatgaccctataactgaaaacgcaacaaaaaatataattaaatcagtagatatatatcatgatgatatggataagtttatttcattaattaaacttacttcacaaggtagtgagtatgaagagtgtgaaattagacttagaactagagatactatttacgcttggtttagtataaaggcaacaactttatttgataataatggtaaaccttataaagtagtaggaagtttgactgatattgatgaatcaaaacgagaagctgaaaagttgaaagaaagggcagaaaaagaccctcttacagatttgtataataaaaaagcatcacaatcacttatagaagagtacataacattggataaaaaaagaaaaggtgctttaatgattattgatattgataactttaaaggaataaatgataatttaggacatttatatggggatgctgtattaagtgaaattgcaaatgacctaataaatctatttagagcaaccgatatagtaggcagaattggtggagatgagtttattgtatttataaaagatatttctgaaacaagagatattataaataaagcagaagaattggtaaaaacatttgaaaggtcttttttaggtaaaggacgaaattataaaatatcattaagtgtaggaattgctaagtttccacaagatggtatggactatatgacactatttagaaatgcggatatggctctttactcagccaaagggaagggtaagaattgttatacattgtatgataaaaaaattgataaagtccaatatataactaatacaagaaatgcaggagatagtgataatgtagagatgtcttttaaagaacatatcacaaattatatatttgatatactatatgaatcaagtgatatagaagtggcagtaaatttaattctaagtattgtaggtaaacactttaatgtgagtcgcatgtatatatttgaaaattcagatgataatcgagtatgtaaaaatacatttgaatggtgtaacgaaggtgtaacctcggaaattaataatcttaaaaatatttgttacaaggatttaggcaactatcttttaaattttaatgcagatgggttattttattgtaatgatattgaaaatttaggtagtgatgtgaaaaaagtacttaagccacaaggcatacgttcaatattacaatgtaaaattttagagggcaatgaatttagagggttcataggatttgatgaatgttcatataatcgtatgtggactaatgatgaagtgaacactttgacatttatatctaaaacgctcagtatgtttttattaaaaatgcgtattcagagtaagctagaagagtctttaacaattcaaaaatctgtgatggataatatggatatatgggcatatgttgttgacaggaatacctatgaattattatttatcaataaaaaaatgcttgagtcagcatcaaacactcatgtaggtgatttatgttataaagcgatatggaataatcaagataaaccttgtaaaaaatgccctatgatatatttaaaagatggtgatgatacttataaatcatttatgcgcaataaaaagtttgaggtacaggcaaatataactacaactactttgaaatggtttgatgggaaagatgcatgtttaatatttggaagtgaagtaactagtattgaagctgaagaaaatacttaaaatactgtgttatatatatacttaaaatcgcaatttgaatttattagacttaaaatgtctatataaatcatttaagttgtggttttaagtattttttatgatataattaagcgttaagaacaaaattaaaagatacttttgtataaaaaaatatttgttaaatatatattgagcaggtgataatatggaaaataagtttttaccaataagcaaacaagatatgatagatagaggatgggaagaattagattttgttctagttacaggagatgcttatgtggaccatcatagttttggaacagcaataatatctagagttttagaaaatgctgggtataaagttggaataatagctcaaccagactggagaactacagatgattttatgaagctaggaaaaccgagacttgcatttctagttaatgcaggaaatatggattcaatggtcaatcattattctgtaagtaaaaagcatagagaaaaggatatgtattctccaggtgggaaaatgggttatagaccagatagagctactatagtatattgcaataaaataagagaagcatacagtgatgttgcaatagtaataggtggaattgaagcgagtttaagaagatttgcacactatgattattggagtgataaggttagaaagtctatgttaatagatagtggagcagatttattagtttatggtatgagtgaaaagcagattgtagaagtagccaatgcacttaatgatggatatgacccaaaatatattagacatattgatgggacatgctatatttcagatacattggaagaaatatatgataaatatatattaattccatcatataaagaaatttgtgaagataaaatgaagtatgtagaagcttttaaaattcaatatgatgagcaagacccatttagaggtaatataattgttcaacctcatggaagtaagtatctggttcaaaataagccagaaaaaccacttagtagagaagaactagatgaagtatatggattaccatatcagaagacataccatcctgtgtatgaaaaatttggaggaataccagctatagaagaagtaaaatttagtatagtaagttcaagaggctgttttggtagttgttcattttgtgcaataacatttcatcaaggtagagcagtgcaaagtagaagtgaaaaatcaattattgatgaagcaataggaataacaaatttagatgattttaaagggtatatacatgatgttggaggtccaacagctaattttagaagaccagcatgtaaaaaacaaattactaaaggtgcttgtaaaaatagacaatgcttatctccatcaccatgtaaaaatttagatgcagaccacagtgaatacttacatttacttagagctgtaagaaaattacctaaaataaaaaaggtgtttgtgcgttctggaattagatacgattatgtaatggcagataagaacaataaatttcttagagagttgatagagcatcatgtaagtggtcagttaaaggtagccccagaacatatatcagaagaagttttaaagtatatgcaaaaaccagcaggaaaaacttatgataaatttagacagaagttttttgctataaatgaagaattaggtaaaaagcaatatttgataccctatttaatgtctagtcaccctggttctaccttaaatagcgctatagagttagcagagtatttaagagatactcactaccaaccagagcaggttcaggatttttatccaactccagggactctatctacaaccatgttttatacaggtattgacccgcttacaatgaagccagtttatgttcctaaatcaaaacgtgacaaggcaatgcaaagggctttattacaatatagagcacctagaaattatgatttggtatactctgcgttagttgaagcaggaagagaagacttaattggttttggacatagatgtcttataaagccaaaaaatgaaaagccttattttaatagaaataattctaaaaaaaatgtatctaaaggaacaaataaaaacaaaaaaactaatacaaataacagaagtaataaaaatcaacaaaaaagttcaactaaaaaaaagaaaaaacattaaagtataaataaaaatacttaaaaaagaaggattattcgataaattaacagaaattagtataaataaatataattattttaatgacgttacctttgggaggaagagatgaaaaagtatatttctataatattattagtggtggtgactatggttgttttggtaggatgttcaccaggaaaagataaccctaaaaataaggagctatcagttgtcaaacaagtaaaagtagctgttccagatggactaccagcagtggcaatagctaaacttgcaaatgaaaatccagagattaaagaaggatatgaaacagtgtatagcattgaaaagacacctgaggcgatttccactagagtgatgaaaaaagatgcagatatagctatagttccttcaaacatggctgcaatagcgtataataaaacttcatcatataatattgttggaactgtaggaatgggttcactttatttggtgtcaacagaaaatataaaagattattctgatttagttggtaaagaagttggatgtactggaaaaggacttactccagacataactataaaaagtcttttgttacaaaaggatataaattattcaaatataaaatttaattatgtaaattcagcaagtgaactggtaccattattggctactggtaaagttaagacaggtattgttccagaacctgcacttagtgctttgatgtctaaaaatccagacataaaaattataaaaagtttaaatgactcatggaaggaagtaagtggttcaaaagacggttatcctcaatctactttaattgtaaagtctgaatttttaagagataataaagattttgttgattcttttgtaggtcaattatcaaatagtatagattgggcaaacaaaaatcctgaagaattaggtgcatattctgaaaaaataaaaatatctactgaatcaaagataataggaaaatctcttgaaagagctaatttaaaatatattccagttaaggacatgattaaagattataaaaattactatgagaaattagctaattttgatgataagacattaggaggcaaagtaccagatgaagcaatatactttgttgagaaataaaaaaaataaagaacaatttatagataaaatggaggtaacactttcttgtgttatcctcttatttttatggcaaattattgctttaaaaattgataatgatatttttttaccaacagtaggtcaagtatttaatagtataaaagagattatgctaaattctagtttctatatagatatactttactctatggggagatgtttttttagttttttactggctatgatttttgccattatactttcaatagtatcttatttaaatagattttttagaaacttattaaagccaatcaatgctttgacacgttcaataccaactatgatattggtagtacttgcacttatttggtttgaaaaggatagtaccccttttatagttggatttactatagtttttcctatattgtatgataacgttttgggcgctatattgaatatagacaagaacttattagaaatggctaatgtgtataaaataaggtttatagataaggtgttaaaaatttatttaccagccataaaatttcaaattatatctatactagtatcaacattctctttaagtttgaaagttgctatagcaggagaggtatatagtcaacctacatatggtattggaactatgatacagactgaaaaaattaactttaatacatctggaatatttgcatggataattattgttcttttaatatctgctattttacaaatagcccaaaagtttttagcaaggagagcttttttatggaaaagataaagttgagtattgaaaatataaataaaagatatgatagtcgtattatatttagagattttaatattgatttttatgtaaatgaggtaaattgtatccttggaaaatctggttgtggaaaaactacactcttgaacataataagtgggattattaaaaatgacaccaacaatctaaatatcaaagaaaatttaaatagagtaggaaataagcttgaagctagttacatatttcaagatgatagacttatagactggttaacagtagaagaaaatataaagatagttgtaaataaatactataataaaactcaattaaataaaatttgtgatgaatacttggaattggttggaattagtgattataaaaaattctatcctcagatgcttagtggaggtattagacaaagagtaaatattgctagagcttttatatatccatcaaaaaacattataatggatgaaccttttaaatctattgatgcaaagaatacacagcttataatggataatttcagaaatatattaagaaaagaaaagagaactgtattatttgtaactcataatattgaggaagcattgtttttagcagataggatatttattttaggagactctccaattagaataaaaaaaatattaaaaaattctaaggaattggaaaaaaatgaagttttgaagttgatatagagttataataatactgtcgttttaaaatatatttggttaaaatctataagactatattaaaatagtacagaatattcaaaactgtgtataatgttcgtattttataaaaaggaagtgaatgtatggttaagactaatgctatgagaatattagattcaaataagattgattataaagtaatgtcttatgaagtgaaaagtgaacatgtggatggtgttgaggtggcacatgatataggaagagatgtaaatgaagtgtataagacattagtaactcaaggagttagtaagaatatatatgtatatgtaataccagtacatgaaaacttagacttaaaaaaggctgcaaaagtagctaaagagaaaagtgtagagatgattcatgtaaaagatataaataagcttacaggttatattagaggcggatgttctcctataggtatgaaaaagctttataaaacttttgtaaatgaaagtgcaaagaatttagatacaattattgtgagtgcaggaaaaataggatatcaaatagaactatctccatttgatttacaaagacttataaaagtagaatttgtagatgtaataaaaaaataagaattacatataaaatatagagcttatattcttaataataggtgttgtaatattaataaaatgaataataattttaaaataaatattcagttacttatgtgtaattggtataaaaatattgagaaattttaaaaacaatggtaaagtgtaagtataatcacgaatattttttataaagtaatggagggatgttcgcttgagaaaaataaaatctgaacaaatcgtcgagcaggtaaaaaaactttgtatagaagcgagcctatatttaggagaagatgttttaagttgtataaaagaaaaagcgaaaagcgaaaagagtgaagttggaaaaaatatattgaatatattagttgaaaatgctgaaatagctaaagaaaaaaatataccaatatgccaagatactggtatggctgtattttttgttgaaataggacaagaagttttaattgaaggagacacacttactgatgctataaatgagggagtaagacaagggtatgaagaaggctacttaagaaaatctgttgtaagtccaattaacagagtaaatacaaaagataatacacctgctgttattcattatgatatggtaaaaggtgataaaattaaaatagaatttgcagctaagggatttggaagcgaaaatatgagtaagatgaaaatgttaaagccatcagatggattggaaggaattaaaaaattcataatagatacagtttcagaagctggacctaacccatgccctcctatggtaattggagttggtataggtgggactgtggacaaatgtgctcaaatagctaaaaaggcactttttagagaactaggtgaatttaataaggacgaaaatatagcaaaacttgaaagtgaactattaacagctattaataaacttggtataggacctcaaggcttaggtggtactacaacagctttgggattaaacatagagacttttcctacacacatagcaggtctacctgttgttgtaaatataaactgccatgcatcaagacataagaaggtagtaatttaggaggaaaataaaatgataaaaataactacacctgtaaatgaaattgatatagcaaaattaaattgtggagatacaattagtttgagtggtatactttatacagcaagagatgctgctcataaaagattgatagattgtataaataaaggtgaagaattaccatttgacgtatatggtcaaggaatatattatgtaggacctactcctacaaagccaggagaagttataggtgctgcaggtccaacgacgagttatagaatggatgatttgactatacctcttttagaaagaggtcttagattgatgataggcaagggaaaaagaagtgatgaagttatagaaggtatgcaaaaatacggagcagtttatcttgctgcaataggaggagctggagcgtatatttcaaattcaataaaatcatgtgaaattattgcatatgaagatttaggagctgaagctataagaaagattgtagtagaagaccttaaacttacagtagcaatagatagctatggaaataatatatatgagcaaggtcgagcaatttatgaatgtaaataatgtttagaaataaatatgaatatcaaaattaaaaatagttgtgtatattttaaggaggaaaattgatgtctaaggattatgcaaaattggcattagaaatgcatgaaatcaacaaagggaaagtaagtgtagaaagcaaggtagaagttaaaactaaggatgatttatcaacagcatatacaccaggggttgctgaaccttgtttaaaaatacatgaaaatcaagatgatgtttatatatacacttctaaagggaatctagtagcagtagttagtgatggaagtgctgtacttggattaggtaacattggtgctgaagcatctatacctgttatggaaggtaaagctatattatttaaacaatttgcagatgtagacgcttttccaatatgtttaaagactaatgatgtagatgagatagttaaatctgtagagttgatggagcctgtatttggaggtataaatttggaagacatatcttctccaagatgttttgagatagaagagagattaaaaaaatctttaagtatacctgtttttcatgatgaccaacatgggacagcaataatagttgcagcagccataataaactcaataaagttaattgaaaataaaaaaatagaagatttagaaatagttataaacggagcaggagctgctggtatagccatagcaaagatactacttaatatgaatgttaaaaatataatcttatgtgatagaagtggagcattggaagctagtatagaaaatctaaactatgttcaaaaagaaatgttaaaagtaacaaatataagaaatgaaaaaggacctttaaaagatattataaaaggaaaagatgtatttattggtgtttcaggtccaggagctgttacaaaggaaatggttgaaagtatgtctgagaagccaataatattggcaatggcaaatcctactccagagataatgccagaagaagcaaaattaggtggagcatttataatgggaacaggtcgttcagacttccctaatcaagtcaataatgtactggcttttcctggaatatttagaggagcattagatgttaaggctaaagagataaatgaagaaatgaagatagctgctgcatatgcaattgctaatacaataagtgatgaagaaatatgcccagagtatatattaccagatgtatttaataagaatgtagtaaaaaatgttgctaaggcagttaaagaagcagcgataaaaactaaagtaaatagaatataaatttttataacttattaaaaactagaaaagtataaaagactagtgaaattatgtacagtgggatgattttattagtctttttattttaaatatgacacaataatgtcatattaagcttgatataattttaatatggttaggagccaaagaaaaatataaggagtgatttaaaatggaagaaactaaattttgccaatgctgtgcaatgccaatgggacaaactgatgaattatatgggacaaataaagatggaagtaaaagtactgattattgtagttattgttttaaagatggtgagtttacagctgatataagtatggaagagatgatagaagtttgtatccctcatatgcttcaaagtaataaggatatgactgaagatgaagcaagaacaatgatgaacaatttctttccaacattaaaacgctggaaataattttatgcaaaattagttatatgcaaaacatgaaatatggtgttgagaataaggggtggtgtgctttatagcataccacctgttttgttacttgctagttcagttattcttgtatgcttaaatatgttctcatctctctttctattttaaattgtaaaaatctaaaatatgttatttatattctacttctttatccatgtctttttctacctcaagtcaaatacaactacaaaatcatcattttcaattcactgtttaatagaattaacagataaagagttataaaattttctattttttatataaaataatacaggtcaagctgacttctagctacttgggatagtgtatatatttatgatagttataggagtaataccaatcattagactgttgatttgtgtagtcttttgtaaaaacatttgttttaatatattgagtttttgaaaaagtaaaattataattataataaattaagtgtaataatgtattagaagtaaaaataattaaaatagaggtgattaaatgagcagtatattgttagttgaagatgatttaagcttgatatatggattagagttctctatacaaaaaagtggatttagtatagacatagcaaggacagtaaaagaagctatgcaaatgtatgaggaaaaaaattatgacttattgcttttagatgtatccctacctgatggtaatggatttcagatttgcgaaaaagtacgagaggtttctaatatacccattatatttttgactgcttcagatgaagaggtaaatgtagtgatgggtcttgatatgggtggcgacgattatataacaaaaccttttaaattaaatgaattaatttcaagaataaaagcattacttagacgttataatgttgcaagtaatgtgaatgaattaagttcaaataatattactattaaattacttgaaaatcgtgtttttaaaggtgaatttgaggtggaacttactacagcagaatataaattattgtgcttatttatgaaaaataaaaatattgtacttactagaaaaaacatattggacaagttatgggatggaaatggtagctttatagatgacaatacattatcagtatatgtaagacgattgagaaataaaattgaagataatcctgaaaatcctaagtttctattgaccgttagaagaatgggttataagtggaatgtaattaagtgagggtattaatatgaagatattttctaataaagatataaaaatattttttttaattcttatatctattttagtaatgtttattatagtagggcaaatagtggttataagtataactaacaattataaaaaaacgttgatagaacatgattataatatagctggatacttatatagtataggtgttgataaatctaaaataccatcagcatttgttgcacatgaagataaatatattttaaaaggaaaagaaatactagatacagctggatatggatttgatatagatgttagctttacaccaagtgtaaaattgtttcaaagtaaatatataaaaactatgtctatctatttattagtattttttactatgattattttcatactatatatgtatttttttaggcaacaaagtaagatagaagaggctagttataaaattgatttatttatgaatggaaatataaatgaaagactaaatacatatgaagaaggtagcttatcaaaattatttagttcaatagatgttatgtcgacatctttaaatacacatatattaaaagaaaaacagagcagagaatttcttaaaaatacaatttcggatatatcgcatcaattaaaaactccacttacagctttaataatgtacaatcagatactacaagaagaaagtcataatagtgatgtcgttgaagcttttgtacaaaaaagtcaaagtgaactagaacgcattgaaacattgattaagaatttactaaagattacaaagatagattcaaaaacaatagttctcaataaaaataatgttaatcttaaaaatttaattgtcaaaattttgtatagctttgaaactagggcagaaaaagaaggaaaggttatttctataaatggttcagaaaatacattgttgttctgcgattatgaatggatgtcagaggctttaagtaatcttataaagaatgcattagataatacaaaagagaatgataaaataacgatagagtggtttgagacgactataaccaccattgtttcagttaaagacactggaaatggaatccatgttgaggatattcatcatatatttaaaaggttttatagaagtaagttttcaaaagataatcaaggtttaggactgggattaccactagttaaatctattgtggaacaacataatggtactatttctgtagaaagtaaactatcacaaggaagtacattcaccataagttttttaaagcttactaatatgtaagataaaatacatcttgcagtaaggtatatagattattattatattaatcaattagaaaggtgagagagaaaatggatattcttgtggttaataatttatgtaaaacatatggaaatggatatacaaaagtagaggcattgaaagatgtatcctttacagtttcaaaaggagagtttgtgactgtagttggagaatctggttcaggaaagagtacactattaaatctcttaggaggtcttgatactccaacatcagggagaatatttattgatggtaaagaaatatgttcaatgaaagaggaaaaacagactatttttagacgtcgtaacatagggtttatatttcaggcatataaccttataccagaactaactgtggagcaaaatataatattcccattgttattagattataaaaaaccagatactatttacttagatgaagtattgactattttaggtcttaaagataggaaaaatcatcttccaaatcaattatctggtggtcaacaacagagagttgcaattggaagggctttgattacaaagccaagtattatactggcagatgagccaacgggaaatcttgacagtaaaaatagtaatgatgtaatttcacttttaaaagtgactgcagaaaagtataatcaaaccattattatgataactcataatacgaatatagcttctacagcagatagaatactacaggtttctgatggtgtgcttacagacctgggggtgaatagagaatgagaagctacttagaattagtaccacaatatgcaaaagtacataagaaaaaaaatagaactacaattttatgtattattattgcagtatgcttagttactgctatctttggacttgcagatatggctatacaatgtcaaaagatacaatttattaaagatgatggaaattggcacatagtaattagaaatattgatgaaaagtttatatcagaaataaatagtagagtagatatagctcaccatggtagggggcaagtcgttgacagtggagagtttaaatcaaaggagattttgatacaaggtttagatgaagaagtagcaaaacaatttaacttagaaataataaggggtcgttatcctattggggagaatgagactttaatagatgaggatgcagttaaaagctttaatctaaaaataggagattttatcaaaataaaattagcagatggtagaaataaaaattataagatagtaggtgaatattcatcaatatcaagcttaagagctacagataaacatggattaatactttcaatattgggtacacaagctattaaaaaatcagaaacgtacgattattattatattacatttaaagaaaaggttaatattagaaaagccacttctgatattaaaaataccttcaatttaagtgataaacaaatcggtaaaaatgaaagattactttctattataggtcaaggcgactctgacttttctaaaccactgtatttaacagcaggattactttttgtacttgttttagtagcaagtattatcatgatatataatagttttaacatgagtgtaattgagagagttaaattttttggtctgttacgttgtctagggtcatcaaaacatcaagttaaaaaatttgttgttttagaaagtttaattttaagtataaaagctattccaataggcttagtattaggaagtcttgtaactattatatcttctatatttcttaagtatgttaatgagttattcagctcaatgccaattttaaaagttagttttattggtattgcatttggaataattgtagggtttttaactgtaatattatcagctattattccagcaaaaaaagcttcccgtgtatctccacttagcgctgtacgtgggaatctaatgtccaaagaaattttaaataacgggaagacaagtaaagttgcaaatacaggaagttttaaaattgagacttctatgggattaaatcatgctttttcaagaaagaaatcttttgtacttatgacttcttcatttgccattagtattatactatttttaggttttagtgtgcttatagaccttatgtatcaaggacttaagcctatgaagccagaagctcctcatatatctattgttgaccctaattttaagtctgttttaactaaggaagatattaatgaaataagcaatatcaaaggagtaaagaaagtatacagtagaatgatgacggatatagaagctacatataatgggaagaagacaaaatcacaattaatttcttatgaaaagtatcaatttaattgggcaaaaaaatatctattaaaaggagaagttaatgaaaataaactacagtcagaaaaccttgcattagtagaagaggggcatggatttgatataggagataagatatatattaaaaatagaaatgctgaaaaagagttagaggtaggaggtatactttcctcaattccatttgaggctaaagataaatatattggaaatattataacatctgaaaatacttttacgaatataacaggtataaagggttatataataatggatattcaggttgataaagatactcctggagatttaattgaaaatataagacgtgtagtagatgataacttagaggtcagagataaaagacaaagtaacttagaggttaaaaattcgttttatactatggcaacatttgtatatggatttgtgtttattattgcgattataagcatgtttaatatcataaatagcatgaatataagtgttacaagtagaaagaattactatggtgttatgcgtgcagtaggcatatccaacagacaattaagaagaatggtaatagtagaggcaggttcatatgcaatgagtggttgtttattaggtagtatactaggattaatgttacataggtatatgtttatatcgttagtaagttcaatgtttcatttagagtggcaagtaccttttaatttactacttatcactgtactaactatgataataataactttattatcagtaagaaaaccagtcaaaaagatttgtgaattagatataatagactcaataaatgcacaataaatatagctgttgatttaaattaaaaaaacgaagtaaaaatgaaatagaaaatatttttcatttttacttcgttttttatattataaaatttttgttatgttacaaaatttctataaagatgatgtgaatctaaacattatatgacaacgtgagcatttaagttaaaatattttaaatatactattttagataagttccttcttcatcttgataaattaatccttttttcataagcactccaagagctcgtttaaaatttttcttacttgaattaaataatatagaaatatctttagggtcagatttatcattaaatctcatatatccatcagaaccctctaaataacttaaaatcttattttctaaagtatcaagttcatcctttctatttcctctaggagaaagaccaagttttccatcttcatatatttttatgacatgtaaattttcaagaacatcaccagcttttagttcagtaaagtactcattatgaagtattacaccagcatatttattgtctacacatatcattgcagaattattagtttgaaatccatatacaactccagttacaatatctcctacattgtaagtatggtctgttaataaatatgaatctatatctgtagtagcagcaattcttttgcttttgtctaaatatatataaaataaatatttttcgtctctaaatagtggataagtcttagctttaaaaggaactagtatgtctttaggaagtcccatatctataaaagtaccaatgtccgtattatcaactacttttaaatgtgctacatccccaaccttagctaaaggcggtattaaagttgcagcagttctgtcatcagaatctttaaatatgaaagcatttacttcatcacctatgtttatttcattttttccgattaatctattatgaagaagtatatcgtcttttgtgttattagtttgtccatccaaaaaatatccaaattcagtttttctttttactgtaagtttattaaaatcacctatgtttatcaaattaaaatcatcctctcattttatatttataatttagccataatatacttatgtagtagtttgtcacagtatctatattagtattagtgaaatttacaataaataatatagttatttatgtatttttcaattctctagcttcttatatagtataaactccaatttcttttttgtctttaggttttactaaaatttttacaaaataagttaaaaagtattgaaataaaatttcttttaaagtataattggtatataccaaaattggtatataccatatcgaaaagtggtgactatatgaaaatagtaaataaatctagtaatataccattgcatactcaattaagttcaataataagagagatgatagaaactggtgagcttaaagagggtgatgcaataatgccagaaagagaactttgcaacatacaaaatgtaagtcgtatgacagtaaataaaaccattgttggattagtcacagaaggacttctttatagggtacaaggtaaagggacattcgttgcaaagcaaaaaaagaagtatcagttttcaaatgtaaaaggttttactgatgttatgaaagaaaagggagtaaacataaaaacggatatattatcctttgagatggaactaccagatgatttagttaaaagaaagcttggaataagtgataatactacaaatatatataagattgtcagacttagatatactgatggagagccatttggattagaaatagtatatctatcagaagaaatgtgtaaaggtctaacaaaagggatattggataattcttcattatatagggttttaaatgaaaaatatggctataagatacaaaaagctgaacaagtaatggagccagtaatactttcagatgaagaaagtaagcttcttgaaacagatgaaggtgctttagctcttaaacttcatagaaattcctataatagagaaggtagccctatagaatataccatatcaatatttagaacagataaatatcaatatgaaatagtattgagtgagtaggtgaataatatgaaatgtttaattaatggaaagataatattaaaaaatcaaatcttggaaaataaagtattagtatttgatgaaaaaataattgatatagctgatagtgtaccaaaagattgtgaagttatagatgctgatggaaaatatatatctccagggcttattgatattcatatacatggaaatatgggaaaagatacaatggattcgactgatgaatctattgaaacaatttcaaaatcaattatgagacatggagtaacatcttttcttccaactacaatgactatggataaagaacatgtttatgatgcacttgaagttattaaaaaagcccaaaatagaaagcttgaaggggcacaagtattaggagcacatttagaaggaccttttataaatgagaattataagggagcacaaaatgaaaaatttataataaattcaaaatacgaatttataaaagaatataaagatgttataaaagttataacttatgctccagaaaaagatattgattttgattttactagagaaataaaaagatgtacagatatagttttatctattggtcatagtaatgcaaattatgaccaagctaaagaagctataaatttaggagtaactaatataactcacatgttcaatgcaatgactggtttaaaccatagagacccaggcgttgttggtgcagcacttacaactaatgtgtacagtgagctaatagcagatacaatccatataaataaagatttatttcaatttatactaaataataaagggaaagaaagactgattttaataacagattctatagaagctggtggtcttgaagatggcaattattctcttggaggtcagaaagtcatagttaagggtaatgaagctagacttgaaaatggagcattagctggaagtgtgttgtctttaaataaaatggtatttaacttcttagataatacaaaccttaaagtgaatgaagcaattaatttagcttctttaaatccagcaacatctttgggaataaatgacaaaaaaggaagcttagaaataggtaaggatgcagatatagctgtatttgatgagaatttagattgtaaaatgacactttgcttgggggacgtagtatataaaaatatatagtatacaaaacaaactttaaagacagtaaaaacaatataaaaaataataaattaaacttacattagttaaagtagtagttaaaatttaggaggaataagatgagagtattagtgtgtaaagattatgatggaatgagtaaaaaagccgctgaaatgatagcagctcaaatagttttaaaaccaaattcaatactgggactagctacaggaagtacaccagtaggtatgtatagagatttagtaaaaaaatacaatgataatatagtagatttttcagatgtgatgagctttaatttagatgaatattataagttaccaatatctaatgaccaaagctatgattattttatgaaagagaatctatttaatcatgtaaacataaagctagaaaatactcatctaccaaatggaatggctgatgatattgaaaaagagtgtctgaactatgaagcttctatagatgcagctggtggtatagatgtacaagtacttggaataggtcgtaatgctcatataggttttaatgaacctgatactaaatttgcaaaaagaactcatgtagttgaacttacagagtctacaatagaagctaatgcaagattctttaaatcaagagaagatgttcctaaaaaagctgtaagtatgggaataggttcaatattgaagtctaagaaaatattgcttttagcttcaggagaagaaaaagctgatgcagtatataatactgtttacggagatataactccagaagttcctggttctatacttcaacttcataaagacactatagttatagtagatgaagcagcagcaagtaaactgaatccaaaagattataaattagtataagaatagaatgtagtttaagtgaaaaatagctatcattgaataatcaaatttatttaatgatagctatttttatttaaattttttacttctttttatttaaattagttattattgtttaaattacttgcttattactttttacgaaaactcgttatcaagaagtatccgaataagatgttaaaaattattatgtttagtgggattctatcaagcataataaaattacctataattgggatattaccaattggaaacataaagaagaatacaggcatcagtgatagtaaaaaagatggaaaacaaagaagaagtaatcttggaatatcaatataccaactaccatcctttttgtattctctaatcaataattcagttcctagtaacaaaccaataccaccagaggaaattaaattaataaaaatgtatcttttaaagtcttgcatataaccagtgtgaaattgagtatagaaatcataatttaatttaacggctaaaaaatatataagcaatagaatgattaaaaataaaagatatctaagagcttttttcattttaaattctcccttcagaaatactttattcagttttattttgttggaatctgattttatcatttagtttaagaaatccataatattagtgaagaatgaaataagtattatatatgaataaatatttttagaattaaggtgaactgtagtgcttaatataactataatattaattgtttgaatattcaataaaaagtttaaaaaatatcaattttgatataaactgaataaatacagttgaatattaaattattattttatcaaaaatatgcaaagtactacaccttcaaatatcacctaaagtaattaaaaggcaattaaagtgaagtagttcaagtatttctaaaatgagtttaataaattctataataatttattttttgccttaaaattgccttaaaatccaaacaattttaaaactaatgtactataaaaagctggtataatttaaatatagtaaaaaataagatttatcttatctattgggatttaattatttaatcaatatatttataccatttaatttaaataaaaagtctattaaggagtgagcttatgagtaagttaatttatatagcagatgatgaagataatataagaaatttggtaaagacattcttaaaaaatgaaggtcatgatgttatggattttaaaacgggtgatgaacttttagaacaatttaatataaaggagtgtgacttagtaatactagatataatgatgcctggctcaagtggttttgaagtatgtacaaaacttcgtgagaaaagtacagtcccaataatcatgcttactgcaagagatacagatatagattatattacagggataaccttaggtagtgatgattattttacaaaaccatttagcccaatgtctttggttatgagagtaaaatctatatttagaaggatagagtttgaaaagaaacaaaattatgataaatatagtaactcgatagatatggaattaaaatttggtgatgtaataataaataaaaagaataaaatcgttacaagtaaaaatgtaaatatagaccttacaccaaatgaatataatctattgacttatttgtttgaaaatatagatagagcagtttccagagatgaattattaaacaaaatatggggatacgatatagaagttgagacaagggctgctgatgatacagtgaagagattacgtaaaaaaattttagatacaaatattttaatagaaactgtatgggggtttggatttaggttgaaggagaaaagttaagatgaataatggaaatgacaagaatagaattggaaagattaaatccaaatttaaattaaagttctcaaagaaaaatataagcataaaaactaggattttgttgagcatactttgtttgataattatagtatttatgataatattagtatcttttaatgtatttcttgatacatatataaaaacaactgcgaatgaagaattgacgaagtctacagaaatagtagaacatatggatagtaattttagacctattaagccaccacaagatgatggaaagcttcctcccaaagtattatctaattttatgagaaatgtacaagataaagttaggatggcagaaacacaatcagatgctgatgctatggtagttgattctaagtataacctgatatttccaacaagagaggatgatttcttaaaaaatgttgatgagatggagctgattagggagtgtattcaaaatgaaaaattagatttaaattcagatgaaaatacacggatatctaccagaaataaggattattatatttcaactgtaaaaattactagtatatatggtgaacaagacaaatatcttatactttttatagacatatcaaaaactctaaatctagcacaaaagataaatattgtattaatatctgtaatgtgttttgctggaatattagcaatatttacagctgtgattttatctgagaaaattgctaaaccgataaaagagttgtgtgagtttgcaaaaaaaatgggtcaaggagatttcaaaagaacctactttgacttttcagataaagaattagtagagctctcaactgttatgaataagagtgctgagtatctggataagtatgataatgaacaaaaaatattttttcaaaatgcatctcatgaattaaggacaccactcatgtctattaaaggttatgcagaagctataaaatataatgttatagatagtaaacatgcaagtgatataattcttgaagaaagtgataggttaagtgatatggttgaagatttattatacatttctaaaatagataatataactaaagattttgaacttgtagaatgtgatttaagagaagtattttcaaattgtggagctaggcaaaatgtaagagctataaataaggggataaaatttatttatgaatttgatgaagaaatggttttatttgaatgtgatgaaaaaaacatttccaaagcatttatgaatcttatagaaaatgctttgagatacgctaagagtgaaataaaaatagtgtgtaagtataatcaaaaaaatatagttgtgataatagaagatgatggaattggaatcaagaaagaagatttacctcatgtttttgaaagattctataagggagtagggggaaatcatggaattggattatcaatagttaaatctattgtaaataagcatggtgggcgtatatacgtagaaaatggcaaaaaaggagctaagtttactatattatttaaattgtaaaaaaattagagaaaatataaagatgtttgaagttgttttttatatatatctgttgtatactgttgaaaaaagaacaatattaagctgacatatattacaataattgacatttaaagtaaatgcttaaatatagatacgaaaggaaaagtaaaatctgaagtgtatttaggtttaagtaagcttcttattttataaaaaatatgtatgaaagaacagctgatttttaatattacaaatttagtaacggttgtatttgaagcttttgtcatccatatgtttttatcagactttttaggtcagaaagaagggtatataaaagttgtaagatatgctaaactgggttttataatatgtttaggattctgtaatttaataactttaaaccctaaaatcacaatgcctttaatttttatccttattttttcaacatcatttttatataaaggaaatttaaagacacgattgtttactactgttttattaagtatattctttatactgtcagaaattgtagttacaagtatttttgttttatttgtaaaagaaggctttgaaataatgcttgaaaataatagtataagagtattggcgacaattttatctaaaattgtctttttgttgacttgtaaaattatttgtctatttaaaaaagatgtacatttagatatgcccataaagtattggctccctttatttttaatacctatatttagtttatttctgtctgtttctatctttgatgtaagtaaattttttagtcttgaaagtttaaaatttctaagtttaatatctagtgttggcattttatatattaattttattgtattttatttatttaaatttattatagataaaactaaactatctatgaaatatgaaatacttgaaaaagaaataattcataaggaagaattaagacttagtaatgagtgttataaaattattgttgaacagactgattctgtcgttttcgaatggaatatcaaagaaaataaatcatttgtatcgcaggcttggactgaaaaatttggatataacaatgcatgtaagaatatttttaaagaaattaaagataaagacttagttcattctgaagataaagctatatttgaaggttttcttgaaagtattaaaaaaaagaatatacacagtcaagcagtatatcgtttaaaaaaatctaatggtgaatatatttggtgtagaacatcaattacaagcatttataatgatgaaaatgaacttttaagagttgtaggagtaattgtagacgtagatagtgatataaaaaaatatgaagagttaagaactagagcagaaagtgactcattgaccaatatatacaataaaggtacatttgaaaaattagtggaagaaactatagttatgaatacaggtgataaaaaagatgcattattcattattgatttagatgattttaaagaaataaatgataattttggtcatccatttggtgattttgtactaaaaacatttgctgataagatacaagctagttttggtaataaagacttagtcggaagaattggtggagatgaatttgttgtatatatgcaagattatgttacagaagtaaatttgcataaaaaagctaaagaattaaatagagtactttcggataattacactgatttgagttttagttttgattcttctgtcagtataggtattgcaaggtatcctcaagatggaacttcattttttgaattgtttaaaaatgcagatagagcactttatagcataaaagcatcaggtaaaaattcatattgtttatttgaagaagaactatatgtacagtgaatttgaatttagattttatgtgagagtaagatttatatatacttgtggctgtctgatttataaaatatgttactttgtatatttttatatgtttcagtaaggttaattaacataagcaaaggtgtaagtaaatttatattagtttaagtttacttacacctttataaaaataaattttgtaaatttaaacagttggttttataaggatttttatttattttaatatcttagatattcctttttgtattccttagagaaaataaataatgaaaggagtacagaaaaaattaaacatcctaatataccacttgaattaagtcttaaagcattaaagtttaaaaaagcattatttaaatcggtatccaaaagaaaaggatgctttgatttgctatatatggaaaaattaaaaatatattcataatcaaatttataaaattaatatctttccatcctaacattacatttacttagattaattattattataaaaataaaaatacaaataatagattcatttacattcttaaatgattaaagctctttaccctttaaacatgcataacatatcgttataattccagtaaataagactaaaatgcccattcctaaaattgcagtttcatcatctattactccaaatgcttttaaagtaacttatttcgctttgtataataataatttgtctctttttatattttaacttctgctgagatttgagttagatattcgttagaatctcgcacacttatatcatatagaagatattcttcataaacaaaatccccaatacgtaaattattctgattaaaaaaatttaataacttttcataagccttgtaaatagtttcataactacctttatgataagcagttacataaagtccctttggtttgattgatacaggatatttcttgtactctttattaacttttgtaaataaatatgaatatgattcaaagtctttattaattatatcttcacctttaatgattgagccaatcgtaccatagtcactcaattcatagttgtccataaagttaatacattcatataaaaaattttcttcctcatctcctaaaaactgttctttatatgtaataggtgttttgaccaagtactcttcctcatgttcttttaaagtaatagtattcgcatctatattacaggcatttttagtgaatgaaatagtagattccattagagcttgaatattatttagtttttcaatttcatttttaatatcaatggttttcttttctaaaagctcaattagtaaattaggtgttcttttgtctatataagctttaatttcttttaaaggcatttttacttccctaagtgaagaaattataccaaaaatgctaagttgatggtatgagtagtatctatatccattttctttctttaattctggtgagaaaagacctatatcatcataatggaaaagtgtttttttattgattccacaaatctttgcaaattctccagttgtaaaataattttttgaaacttgactcataattataattcctccttgactatcctgttacagtatagtttatcatagtattttgtaaaggagtgtgattatatgaaaaaattaattcattttttaaaaccatatagagttttaattgttgtagttttgatatttacgtttttacaaacacttggaactttgtatataccaacacttacagcaaatatagtaaacaatggtgtagtaaagggagatatagattatattgtaaaaacaggtttaataatgatgatagtagctggtataacagctttatcagctgtgttagtttgtaaagtatcagcaaatctttcatctggattttgtagagatattagagaagcagtatttgtaaaatcacaagatttatcaataaatgattttaataatataggtacagcatcaatgattactaggagtactagtgatattactttaataggtcagtctgtgtttatgtttattcaattggtattaccagcaccaattataactgtttctggtctattcttagcatattctatagataaagcaatgacaattattattgttgtagtaatgtttttattcatgctttcagcatttttagttggtaaaaagcttataaagttgtttaaaatgatgcaaataaagatggacaatatgaatagggtattacgtgaggtagtaactggagtaagagttataagagcttttaatagggagcattttgaaaaaaagagatttgatagaactgcaatagattattctgaaacagcaatttcaataaataaagtatttgcagtacttatgcctattgtaatgttaataatgaatttaggtatagtaagtattatttggtttggtgggatgagagtcagtaatggaaatatggagataggtcatataatggcacttattgaatattgtatcttaattttattctatttaatcatgggagtaatggtatttatgtacatacctagagcaggtgcatgtgcagatagagtaaatcagatattagatatagaacctgaaattgtagatggaaatggtcgtaaagatactgtctcagagaggggacatttagtatttaaaaatgtaacattttcatatgcacaatcagaagaacctgtgttaaataatataacatttgaagcaaaatctggagaagtaactgcaattataggaagcactggctcaggcaaatctactattgcaaatataataccacgtttttttgaaattcaatctggagaaatatctataaatggtcaggatgttaagaagattcctcaaaaagaacttagagataagattggatttgtgccacaaaaagcttttttatttagtggaacaatagaagaaaatataaggtatggaaaagaagatgcaagtattgaagaaataaagcatgctgcaagtatagctcaagctgatgaatttatttctgatatggaagacaagtatgactcatttgtagcacaaggtggaaataatttgtcaggtggtcaaaaacagagaatatccattgcaagagcgttagttagaaagcctgaagtatatgtctttgatgatagtttttctgcattagattttaaaacagataaaagacttagaaaagcgttgaaaaatgaaatcaaagattcatcagctataattatagcacaacgtataagtacaatcatggatgctaatcagattatagttttaaatgatggaaaaattgtaggtattggaaaacataaagatttacttgaaaattgtgaagtttataagcaaattgcggattcacaacttagtaaagaagaacttgcataaaatgaagaattaatctgatatttggaggtgtatgatatgagtgaaaaaagaatagatgaacaagatatagaagtacttagttttgaagatggcatgtcagcagaaaaagttaaggatgcaaaaaaaactactaagagattattaaaatatatggcaaaacaaaagtttaaaatattaattatttttatttcagtattgataagttcagcgcttacagttttagcacctatggttatgggaaaagctattgaccaactatttaatggaataaaaactgcagtccaaacaggtacaaaattcagtgtgaattttagtactatgggggggatagtatcaatacttctagggttgtacttaattagtgcagtatttatatatattcaacagtatattatgtcaggagttgcacaaaatctagttcttagcatgagaaaagatttaagtgataaactcaataaacttcctcttaagtactatgattctcataaaaagggggaaacacttagtatagtaacaaatgatttagaaaaagtagcagatagtttacaagaaggattaatgcaacttattacagcagtagttacagtagttggttctattgtaatgatgataagtataagtgtaccacttacaatagtatcagctataacattacttgtttcattgggtattactgttgtaattgcaagaaaatcacaagaaagattctctgaaaatcaaaaggcactaggagagttaaatagcaatatagaagagatatttactggtcaaatagtggttaaagcatttagtaaagaaaaggatactataagaaactttaaaatattaaatcaaaatctttataatgcaagtagaagagcacagttttcgtcatatgcaatatctccaattattagatttataaacctaattggctatgttattatagcagttgtaggtgggatatttgcatcaactggagcaatgactcttggtagtatacaagcgtttattcaatatgtaaatcaagcatcagagcctactacagaaatatcttatattgtaaatatgcttcaagcagcaatagcatctgcagagagagtttttacagttatggatgaggtggaagagataaaggatgaagaatcttcaaaggttattagcatgcctaaaggtaaagtacaatttgagcatgttaaatttggatatagtgatgattttattcttatgaaagatattaatatcaatctaaatgcaggagacaagattgcaattgttggacctacaggagctggaaagacaactcttgtaaatttacttatgagattttatgagatacaaggtggaagaattactattgatggtgttaatataaaagacttaaagcgtggagaacttagaactatgtttggtatggttcttcaagatacatggctgtttaatggaagtataaaagaaaatattgcatatagtaagtcagatgccacaatggatgaaattgtaagagcagcaaaatcagcaagagtagaccattttataaggactttaccacaagggtatgacactatattgactgaggatgcttctaatctatctcaaggtcaaaagcaacttctaacaattgccagggcaatactttcagacccatcagtattgattcttgatgaagcaacatctagtgtagatactagaacagaggtagaaattcaaaaggcaatgaataacttgatgaagggaagaactagttttgttattgcacatagattatcaactattcgagatgctgatttaatattagtaatgaaagaaggcactattattgaacaaggaagccataaggaacttattgaaaagaaaggattctatgaagaactttataatagtcaattttcaagtgaatatgatgaagaagttgtatgattatcaagttttaggcaactaaatgattgataaatattaagttaaatatagtaacatgtaaggttatatggaataagagtatttctctatttcatataaccttttttatttatcaaaataagataaaattttctttctaaattagattgaagaaagtatttatcaatataaaagtaaaataatcattattattagtgaagtaaatattgtttgccacatatatgccataaagatgcacttattttacggagatttaacaaagtagtgtaaagtatactctaaatataaaataaatcaaatagagttaaataaattgagaggtgatataaatagtgaataaaaaattgaactatagatttgaaatgaagcacaaaataactgaagcagatgtgttagctttaaaatcaagactctatccaataatgaagaaagatgaaaatgcatctaaagatggaaaatatcttattaggagtttatattttgatactcctgaagataaagcacttttagataaattaaatggcgttgcaataagagaaaagtttaggataagattttataataataactgctcttatataaggttagagaaaaaaatcaaacattacaacatgacatcaaagctatcaactaatttaaccaaaaaagaagtaataaatatactaaacaatgatattgaatttctaaaagagtcgacaaattgtttattaagagaattttatttgaaattaaaatgtgaaagattagaggcaaaaagcatagttgattacaatagagaagcttttatttatccagttggaaatgtaagagttacaatcgatagtgatattaaaacttctgtaaattcgatagatttatttaataaagatttgccgactgtttcggtaattgatgagaatatgactgtattggaggttaaatatgatgaatttataccagattttataaaggatttaattcaaattaataagactacttctacagcagtttcaaagtatgcttcaagtagattatatatttaagaataaaggctatgatttatataaagatatacataaataaggttaaaaaacaaataggttaaaaataaataaaataaaaaataaataagttaaaaataggaaggatgattttaattatgacatttaatgatatttttaaatcaagttttatagaaaacgtatcaggtttttcatttgtggacagtgctttagcactaggttcagcttttttagtaggtttgtttatatatatggtctataaaaagacttatatgggaattatgtattctcgaccattcaatgtgtcgcttgtagcacttacaatgcttacaacttttgtaatattggcggttacttcaaatgtagttttatccttaggtatggttggtgctttatctatagtaagatttagaacagcaattaaagacccaatggatttagtatttctattttggtcattgggttcaggtatagttttaggagcaggtttgattcccttagctgtcatgggttcaataattatgggattgattctaatattcttttcaaataaaacaatatctgaaactccatatatattgatggtaaattgtaataatgaagattcagaagatatagcaactgataaaattaaaaaagtatttactaaatatcaaataaaatcaaaaagtgttacaccagaaaaaggaatagaattagtgtttgaagtaagaatgaaatatggagagacaagtcttataaatgacttgagtcaagtagatggagttactaatgcagttcttgtaagctataatggtgactatgtagcatagagaggagtaatcttttatgaaagataaaaaatttacccttcttatctctattatgattatatttttatgtgctgtagttggagtttatagtacatctagcaacaaaagtgttgatttatatagtgatgtatatattgaaaaatattttaacagagacaaggttatggaagttaatatagagatagatgaaagtgacttgaaggatatgaatgaaaatgctataaaagaagaatttaaggttgcaaaagtaactgtagatggagatacatatggaaacgtaggtataagaactaaaggaaattcaagtcttacatctgtagcaaatagtgatagtgatagatacagctataagattaattttgataagtataatactagtcaaagtatggaagggcttactcaattaaatcttaataactgttactctgacccatcttatatgagagagtttttaacatatagtatttgcgaggaaatgggattagcgactccagaatttgcatatgctaaagtctctataaatggcgaatatcatggtttgtatttggcagtagaaggattaaaagagtcttatcttgaaaataattttggtaatgtaactggagacttatataagtcagatgaaggaagctcgttgcaatataaaggagatgacccagaaagttactcaaacttaatcgttgaaagtgataaaaagacagctgattggtctaaaattacaaaactattaaaatctttggatacaggtgaagatattgaaaaatatcttgatgtagattctgtccttaaaaatatagcaataaatacagctttattaaaccttgatagctatcaaggcagttttgcccataactattatttatatgagcaagatggagtattttctatgttaccatgggattttaatatgtcatttggtggatttagtggttttggtggaggtagtcaatctatagcaattgatgaacctacgacaggtaatttagaagacagacctctcatatcctcgttattaaaaaatgagacacacaaaacaaaataccataaatatctggaagagatagtaacaaaatacctagattcagactatttagagaatatgacaacaaaattgcatgacatgatagcatcatatgtaaaagaagacccaacagcattttatacttatgaagaatttgaaaaaaatataacatcttcaattgaagattctagtgataataagggatttggtaataaagggtttgacaacaataactctaataacagtgattctaataataattctaatagtgaaaataagcgctctggaaatcaaagtgataaaaaagaagttaatgctgaattaacatcaagcgtagtcaaaactaatacagataatgaaactgaaaataaaactacaaatgatagcgaaagtaagaataatacagataaagataaaagtggaaatgataataatcaaaagctagaaggtcctaggggtaaaggaggtaagtcaataccaggggttttggaagttgcagaagatatgagtaaaactataaaatctcaattaagtggagaaacttcttcgacaaagcaaaactctggtgatgaaagttcaagtggaattaaaggtagtgaaaagtttgatgaggatatgagtggtatgccagaaccacctgagggaatggatggtaaaatgccaccaggaatgggtaatatggataagggagatatgaatggtaaaaatggcaatatgaatatggatagaaatcaagataatccaagagaagctggaggttttggcaatagaggaggaggctctgtgagtaaaacaacaacatacttcaaattaattttaggtggagcttcaatgataataatgtcgattatgttagtaggtgtatcaagggtaaagagaagaagatttataaagtcaaaataagattaaaattgaatataaataattttaatactgttaagtctaaatatttacttagcagtatttttttagaaaataatgtgtttgattaataatataaggtaataaattgataaaaattaaatacagcatattaataatacataataaagtaataaaaaaactgtttaagtataataacttatatttagacagtttttttcatttataaataatataaatgaaattgaaaacatttgaaggatagaaattggttggataaatgtataaattacttcaccaaaaaataatgacaagagttgtaactaagttgtaataaaatggtagttatttagcataaaataatgtatcatagaagtatattataaaattaataaaataagatttttgtaagaaaactgctggcttttgatatttagagtgagtagttaaattatgtttaggaggggtagaatttgttgcaaaaagtattatggaaatttttaaagctagtagtcggtttatttatatgttcagttggtatagtattgacgataaattgtaaccttggattatctccctgggatgtatttcatcaaggactttcaaatcatataggaataactataggaactgcttctataattgtaggctctatagtagttattgctgatgtcgttcttggagaaaatgtaggatggggaactgtttttaacatgctactaattggattctttatggatttacttttatatagtaatttaattccagaggctgatagtttatttgtaggaataattatgttgatattaggattggttcttttgtctgttggaatggtattttatatgggaagtggtttaggaagtggacctagagatggtttgatggttgcaattcaaaagaaaacaggaaaatcacttaaattaataagaggtactatagaagttggagcattaatagtaggatttttattaggtggaaaagttggtataggaactataataagtgcatttggattggggtatttcacacaaatggtatttggcttatttaaattagattgtagtaagattaaacatagatttatagtagatgatataaaatttatcaaagtgtatatgagtggtgagaaaaaagctgctgttcaaaatatagttaagtaatttaagaataaattcaacgaaatgttaagtattttaaattaacattttatttagatggataaattgaatattaaaagaatattaaaatatgaggattgctagaacactataaaatatagatttctagcaattttttatttgttcaatgtttttttagtactagaagtcttattctctatttaatgaatgaattaatttataattagagatactaaactttatagatattaatataaacacctttaaactgtgtattttccaaagcctttaaaatgcttgtatttattctaaataaaaaaataaaaaaatgtcaaaaaaactcttgtattatatccaaattttatatataattacctatgttgtttagaaattttaaactcaatgtttagtaaacaaaatgtttagtaaaataaaacagaaactaggaggtgcaacatggatataggtgaaaagataaaaagattaagaacagaaaaacaactgacccaggaagagctagctaatagatgtgaattgtcaaagggatttatttctcaattagaaaataacttaacatcaccatccatagctacccttatagatatacttgaaatactaggtacaaatttaagggaattttttaatgaaatagatgatgaaagaatcagttttacaaaagaagatatgtttgaaactgaagatgaagatttaaaatataaattaaagtggttaattccaaattcacaaaaaaatgaaatggagccaataataataacattgtatccaggaggacagtataaagaagaaaagccacatgaaggtgaagaatttggatatgtattagcaggttcaatatatgtccatataggcgaaaagaaaaataaagtaaaaaaaggagagagtttttactttagaccaaaagcaaatcactatatatcaaacgaaggcaaaactacagcaaaagtgatttgggtaagtacgccaccatcattttagaatagaggtgtttaataattggtagaaaatataatagaattaagggatatatctaaacattatgaggaacttactgttttagataatttcaatttagatataaagaaaaatgagtttttaacattacttggaccaagtggatgtggaaaaactacaacattaaaaataatagcaggatttgagtatgctgatgatggtaaagttttatttgaaggtaaggagataaataacttgccaccatatgaaagacaagtaaacacagtatttcaaaaatatgctttatttccacacatggatgtttatgaaaatgtagcttttggattaaaaattaaaaagactccaaaagatgtaatagatgctaaagtaaaagaggttttgaaacttgttgcactagaaggttttgaaagacgacaagttgaatcattgagtggaggacaacaacagagaattgcaatagcaagagctctagtcaatgaaccaaaggtattattactagatgaaccacttggagcacttgatttaaagttaagacaagagatgcaaatagaattaaagagaatccaaaaaaaattaggaataacatttgtttttgtaactcatgaccaagaagaggctcttactatgtcagatactattgttgtaatgtataagggcaaaattcaacaaatgggaacaccacaagatatatacaatgaacctaaaaattcatttgtagctaaatttataggtgaaagtaacatatttgatggaattatgatagaagattataaagttaatttctgtaatagagattttgagtgtgttgataaaggattcgaaaaaaatgaaaatatagaagtagtaataagaccagaagatataaaaatggtaaagccagaagaaggaatgttaaaggggaaagttacatctacagtgtttaaaggagtgcattacgagatagaattgaatgaaaatggaagattgtggatacttcataataccaaaaatgctgaggttgggactgaactaggcatggatatatatccagaagatatccatataatgagaaaagagaataactaagatgaaaagaaaatcttttttagcatatccatatgtagtttggagtgcgatatttgtaataattcctttaatattagtggtattttttagttttacaaaagaatcaggtggaggttatgcctttacacttgagaattataaagaagtaattgaccctatatatatgaaagtttttgggcgttctattcttttagcaggaggagctacattaatatgccttatagttggttatccagtggcatatataatttcaaaggctcgtgtaagtagaagaggttcattaatattattgtttattcttcctatgtggatgaactttcttttaagaacatatgcatgggttgctatattaggaaaaaatggacttttaaatacatttttaggttggtttggaatacaaccattagcaattttgtatactaattttgctatacttttaggtatggtgtataactttttaccatttatggttcttccaatatatacagcactatcaaagatggataatgatttgataaacgctgctcatgacttgggtgcaaataatatgacagtttttagaaaaattatatttcctttgagtttgccaggtgtaatgtctggaataactatggtatttatgccagcagtcactacttttgcaatatcaagactgttaggtggaggtaaaataatgctggttggagatttgattgaacaacagtttacagttgttggagattggaactttggttcagctatatcgatatttatgatgatagtaatattaatatctatgtctataatgtcaaaatttggagatgaatctgacaaagaaggcggtgggttactattttaaaattaaagaaaataacttctaatatatatttagcattagtattcttatttttgtatgcacccatatttgctttggtactattttctttcaatgattcaaaatcaatggcaagatggaatggatttacatggaagtggtatggtcaattacttcaaaatgagagtataatgagtgctttatattatactattgtaatagctatattagcgtctgtaatatctacaatagtaggaactataagtgctataggaatacataagatgagaggtaagagtaagaaattaatactaaatgtaaactatcttcctattttaaatacagagatagttacagcagtagctcttatgagcctgtttgtatttgtaaaaatggaatttggatttacaacaatgctattggcacatataatgttttgtttgccatacgttatactttcagttttgccaaaaatgaagcaattacctgataatatagaagatgcagctatggacttgggagcaacacctatatacgctcttagaaaagtaattttaccacaaataaaaccaggtatagtttctggatttttaattgcatttactatgtcaatagatgactttataataagtttctttaatgctggaaatggtgtaagcaatctttctatagaaatctatggaatggctagaagaggtataaaacctgaaataaatgcattatcaacaataatgtttgcagtggttctaggtttacttttactagctaataaaaaagaatctatagtaagggggattaaataatgattaagtttaaaaaaacaatatcccttatagctgtaggtatgatgacagttactttatttacaggatgtaataaagcaactgattctacaaaagttttaaatgtatataatgttggagattatatagatgagtctcttatagataagtttgaaaaagaaacaggaatagatgttcaatattcaacttatgatactaatgaaatgatgtatcaaaaagtaaagagtggtagtacacactatgatttagtatttccttcagactatatggtagagaaaatgaaaaatgaaggtcttttggaaaaattagattttaagaatatacctaatatgaaatatttagataagagttttttaaatcctgtatacgacaaaactaatgaatatagtgttgcatatatgtggggaactcttggaatattgtacaataagaaagaagttaaagaccctatggatagctggaatatactttggaatccaaagtataagggaaatataatgatgtttgactctgttagagatactatagggataactcttaaaaaattaggatatagcatgaatagtgtaaatccaaaagaaataaatgaagctaaaaatcttttaatgaaacaaaaggatttagtattggcttatgtaaatgatgaaggtaaggatagattgcttggtggagaagtggcaatgggtatgctgtattctggagatgcagttacgctaatggagcaaaatcctgaccttgattatgctatacctaaagagggaactaataaatgggtagatgctatgtgtgtacctacaacagcacaaaataagaaagaagctgagctgtttataaactttttattagacccagagaatgcaaaagtaaatgctgagtacattgggtattcaacacctaatacaggagcactaaaattattagacccagaaataactcagaatcctgttgcatatccatctaaagaagtacttgataaatgtgaaacttttgaagatattggtgaaaatataaaattatatgacaaggcttggatagagttaaaatcaaaatagggtcttgttggtttaagtaaatttacttaataaatacttaataaaactgttcttttttagaaaatttattttctaattattgaacagttttattttttgtttaggtcatgtttttattttgagtttatttttatgagaatttaaagtacagtaagtttcattgattactatttttataataataactataaagaggttgtctcgaaattgagataagcctctttttcattgttgaaatgatgaaaacatgtttgatttcataaaaaaagagtgattcatgagctaaagaatttgctttgagacagtattttttattaagttatattcatatgcaatttaaatagtttattaataaatgaaaacttatttgtataatgattttaataataattagaaaaaatgggcaacttaatagaataattggaggtgtaaatttataaaaaatgaataggataaataaaaaaatagatttattaatattggctttgctcgtttttatatttttaattgttggaatagtaatactatcgattaggacagaaaataaattgaatgtgttcataatgttagcaataattttttttataataatgttaacttatttatcaaattcagtagtggggttgataacaagttcaataattatatttatgtatacatcctatattttatataacaatattactcacaatatggatgttgaatttatatcatatatgtggataatagcaacaccagtatcttcaattataatgggtaatctgaacaaaagcataaatgaattgcaaaatacaaataaaaaactatctgaacagtataaggaattagtgactattgatagtgaaactggacttagaaatttaaagattttttataatgatgtaaatatggagataagtaaatctattagacataatactgatttttctcttatgatagtaaaattaccatactacggaaacctacagactatatttggtgaaaacaaaactaataaaatagtaaaatatattggttcaaatattatagaatgtacaagaaatgaagatataatttatagtttacaaaaagatatgatagggatactaatgccaaatacatctttggaaggttcgaaagttgttaaagacagaataaagaaaaggataaaagaattaaatttagatttaaacaataggggaaaatatgtaaatatagatgtcaaaattgcatttttacaatataagagtagttttggagatagtataaattttaagaatatagttgaagaggaacttcaatatgatgtttaaaatatttaataaaagtttattaaaattagtaattgtattatcaatagtactgacaatatcaaattttagcttattttcatatgcatcagaaattacttccagcacagataaggtattaatcatatatgattctaagaaagaaacagcttataatagagatattttaaatattatgagaactctattgggaagatttagttcagatatagagctattaaaattgagtaactatgatggtgagataaatgaaaattattacagtcatatatttattttaggaatcaatgaaaactcatataataatgataaaaacactaaaaacttgattagttccttaaattcatataaagtaactatatgttggttaggatatggtatagaaaatcttttggaacataaaaaatacaatttagactatgtaggaaaaacaaacaatatagttagtgtaaattatagaggtaaatcatataacttggatgaacattatgtttttaacattgtagaatcaaaagatacaagtaataaagtaataggaagtattaatgataccttaaataagtatccatatataataaatgataaaaatcttttttatgtatcaaaattagatttagatggagttttattttatatattttgcgattcacttaatgatatttttaatattaagacgtttgataaaggacgtatatttgtaagaatagaagatgtacatgcttttagagaaccaaaaaatcttgtagagatagcggattatttaagtagtaagaatataccatttacgattgcattaataccagcatatgtaaatcctaaaaatcataaagtaataactttatcagaaagccctgaaattgtcaaagcaataaaatatatgcaagataaaggtggaactgtgatattgcatggatatactcatcaatacaagaaagaagaagtttctggagaagggtatgaattttgggatggtaaaaaagatgaacccttaaaagaaaatatgaagatatttgtcaaagatagagttttgaatggtcttagagtatgtatagagaatggaatttatcctcttgcatttgaagcgccacattatgcaatggaatcagagggatataaagaattaaaaaaatatttttctacttatatggggcaacatcaaaataatgataaaaaatttagcacaaatacatatccttatattattagggatacagaggagtttaatatatttatacccgaaaatttaggatatatagacccagaagacaagtttacttttcaaaatataaaagaaaatttagataaattatctattgtaagaggttttagtggagggttcttctttcattcatatttaaacatagagtatctaaaaaacacaatagaatatttagaaaaacagaatatagaatttatgaatttaagagattttaataattgggtaaaagttgatgaaatacaaataagaaataatggagatgaaattatagtcaactatgataaggacttagatgaaataactaaaagtgatactagatttaaatacatatccaatattagtaaaattttaatattcatagtatctataagtgttttaatatttgtgattatatttatatattttaagagaatagataaaaagaaatttttaaaataaatgattttatattagaatcaatattttaaaatattttaggagaaatttatgagagatttaaatgtatcagagtatttgttcgtatttagtctgtttagtatatggtctttattgcttataaatattattttagctatgggtggatatatattttattttaaaaactttgataaagaaataaaagaaattgatgaatatcctatgatatcaatacttgttcctgctcataatgaagctaaagtgataggtagaactgtggagtctttgttattactcaattatcctaagagtaagatggaacttattgttataaatgacaattcttctgataatagtaaagaaattttagaaaatataaaggataggtacaacaattataatttcactataataaatacagatagtttaacaggtggaaaaggaaagtctaatgcattaaatattggatataaggtttcaaaaggagattttatagctgtttatgatgcagataacacaccagataaaaatgcacttagatatctagtacaaactatagtaatgaatgatgaattaggtgctgttattgggaaatttaggactcgaaataaaaataaaaacctattaaccaaatttataaacatagaaacattaagctttcaatggatgtcacaagctggtagatggcaactttttaatctatgtacaataccaggaactaactttatattgaggagaagtatcatagaagaaattgaaggatgggatagtaaagcaattgcagaagatacagaaataagttttaggatatataaattgggatacaagataaagcttgtaccacaatctataacatgggaacaagagccagaaactgttaaggtgtggataaagcaacgtactagatgggcaaaagggaatatatatgtattaatgaaatatataaaaaatatatttaaacagggaagaaataagattgtgtttgatatagcttactttttttctgtatattttctatttttaacaactgtaattatatccgatattttatgtgttttaagtatatctaaactagtagaaatttctattccaattaacttttttctaatatggatactatcttatcttttatttattatagaagtgagtataagccttactatagaaaaaggtgaagcaacaattgaaaatatattcatagttgcaataatgtattttacatactctcaactatggctgtttgtagctataaaagggatgatagagtatctaaaagatataatttttaaaagagaggttaaatggtataaaacagaaagattttgattcatgtacaggaggaattaacatgaaaaaatttattatatcaattatatctttagtattgtttttttcaaatatatcacttatatacaaagtaaatgctgatgagactaaagttaaaaattataagtttgaaagagatataactattgatggtgttataggaagtaatagtactttttttgaagtaaataaaaattgggatattgaagaagttttattgcatcttaattttagtaagagccaaatattaaatggagatgtttcaagtttaactgtattgataaataatgtaccaataaaatctattaaattaaatgctaagacaaattataaaaatacattagaagtattagttccaaaagattatataattcaaggatataatgaaataaaaataaaaacatacaaaacaatatctgataaaatttgccaagatgattccaatactgggaactggatggttattcacaaagaatcatatatatcaattagatataagcagaaaaaggtggaaaactcaataaatgaatatccgtatccatatgcagaaattgaaaataatcataaattagatacaactatagtagtaccagataatatgactagaggagagactacagcagtgtttaatttggcatcatcatttggaaaaataacaaaaaatgatgatttaaagttagatgttaaattatattcagaaatgaaaaattggtcagatgataatattatatatattggtaaacctgaaaatacagcagaagaaattttggatattttaagtataaaggaacaaaccctattatcttcaaactgtataatcaagcaagtagattcaccatacaataagaataagaagatgatggtggtaattggtagtaatgaagatgatttaataaaggcatcaaatttattaatagaaaatagactttctaaccaagttttatcatcatcagtgcttgtaaacaaagagactaatataaaaattaatagggaacaaaaattaaatttaggtcatttaacattaaaagacttaggatattctgactttttgttggaaggagcatttaatcaacaagctttgtttgatgtcaaaataccaacgggtaaggtattagatgatggttcaaagattatcttaaatttaagatattctgacaatttagattttgaaaaatctttagttacagtgtctataaatgatgttattgtgggaagtaaaaaattggataggtcacattctaataatgataagttagaattaaaaatacctaaagatatagataataaaaactattatcaagttaaattgacatttaatttgagtataaaaaattcgaattgtgttactagagagagtaataatccttgggcatatgtatcaaataattcttatttggcgttatctacgaaagaaaatgaaaccttatcttttgaaaattatccgtatccatttgttagagatgatgagtttaatgatttaactgtgataatgccagattattcagggtcacaagctatgacctggatgtttagattaggtgttactttaggtacgaatataaattcacataatggaaatataaatgtaattagaggaaaagaatttagtgacaagtataaggatactaatattgtagtttttggagtgccacataataattctgttataaagatgttaaataataatttaaatataaagttcgataaaaattactccaattttatatcaaatgataagataagctttattgatgattatggaaaaaatatttctaccattcaattaataaaatcaccatataataatcaaaaaaatatcatggtaattagttcaatgaatgaaaaaaacttatatttaggaatggattatttgttgaataaaagtaaagttaatgatttaaaaggagatacattgataattgatgaatacggagaggtagaagatttagcttataatttaaaacctaagaaagaagtaaaagattcaagctggaatatgagtataaataagacaactaaagtatttttaatgatttcttttattactataattgtagtcatgatattatcaatgctatatataaaaaaatataaaagaagataatatgataaatttattattttaaaagaggtatataatttgaggaaatatatgaataaatttaaattaaaaagaagcattttaatctcattaataatcttaatttttatatttatagtgtactttgtaagtattgagttaaaagatgggagtctagtaaataatcaatataaaggtaagattaaatcggccaatttatctgtagattatgaaataaatcaagttatgaaggatatagataaattgggattgaatacagtaaatgtacctataattataaatgtagagtccattaattctgatattatgtcaatagataataatagtaaagaaaaggcaattaagttaataaaaaaattaaataaaaaaggtatttcaacaatattagaggcatatccatgggttgaaaatggaaaattgtatgagactgactggaaccctataaataaaaaaagatttttttatacttggcaaaatgccatattaaatgaacttataattgatgtagcaaatccactggatgtaaatgttttaaatattggttctaattttgtacatttggaagaatatcaacaaaattggggtgaaataatagattttgtacaatccaaatttgatggtcttgtaacgtacagaactaattggtggtatacaaaaaaagatgattcaagtagtaagttgttttatgaacaaaaattgaacaataatttttttgataagttagattttatatctatagcagcatattttgagttaagtaataaacctgttaatacagtggatgaattaatttctgccttacactcatctactgtaaacaatagaggacaaaatataaaacaagaaatatataacctttataaagctcatagaaaacctatattttttggagaattaggtttttcaaatagagaaagtgcaagttctcagccgtggaatcatactccttcaaaagctgtaaatggcgaagaacaagcaaggtgttttgaggcatataagaaagtttttgaaaatgaagactggataaatggtttttctgtgttttgtgtaggtaaaatagatgacgaaaaaaatttttacccatcaaaagagagtataaaagttattaagtcttggtatgaataattttaaaagtgtagaatttatatagattaaatagatgattaggagagatataaatgaatgacatcaaggttatgactgtatttggaactagacctgaagctatcaaagtagcacctttaataaaggaacttgaaaaaagagagaatataaaaagtattgtttgcgttacagctcaacatagagaaatgcttgaccaagttatagaaaccttcaatataaatgtagactatgatttggatataatggaaaaaggacaaagcctgaatgatataacatgtaagattttaaataaacttcccttgattttaaacaaggaaaatccaaatataatattggtacatggagatacaaccacaactctagctacaagtttgactgcattttataataaagctcttgttggtcatatagaagctgggcttagaacctatgataaatattctccttttccagaggagttaaatagacaacttacaggtattattgctgatatgcactttgctcctactaatttggctagaaaaaacttgatttctgaaggaaaacctaataataatatatttgtaactggtaatactgctattgatgctttaaagatgacaataaaagaaaactataatcatcctataattgatgagattggtaacgataggatgattttgttaacctctcacagaagagaaaatttgggtaaacctatgaaaaatatattcagagctataaagcgaatagtagatgattttgaagatgtacagatagtatatcccatacatttaaatcctaaaatacgaactatagctgatgagatatttggaaaatttcctgaaaaaattcatattatagagcctttagatgtagctgattttcataactttttaaataaatcttatatgataatgactgatagtggaggaatacaggaagaagctccatcattaggtaagccagtccttgtgttgcgtgataaaacagaaagaacagaaggaattgaagcaaagacacttaaattagtaggtactaatgaagatagaatatataattcagtgagcgatttattaataaataaagatagctatgttcagatgagtaaagcatctaatccatatggagatggaaatgcaagcaaatatatagtggatataataattaaaaaatttaattgcaagtatttaaattagataaggtctaaaacattaactaattgatataagatttatgataatattaaggaatacaatttttaagggggagtaatatggctagaaaattaataaaaaatttaggtaaaagtaaaagtgtaaagagagtgaaacttttatttaagaagatttttattactgtattcatagtagcaagtatagttgctatttttaatataacgaaatattttgaggaattatacaaagtaagggatttaaaaagtactaaaattgaatactatatggatgtggctgatgaagcaggagatggaaaggtccaattaagttggaaggccttacttgctatagacatggtaatacatgatgaagatttaagtaatataaaaaagaaagacacattggatataggggaaaagtttatagtagaagataaaaatgataaaggcgaaaaggtgtataaggtaaaaaagtttaataaggtattaagcgaattgaaatttgactcttctcaaaaaagtagagcaagaaaatacatgaaagatttggaatacacataccttggaaataaacaattagatagtagtgatgaaaaaattaaatttataaagaagttagaagactcagctataagagaatatattgattatggaatattgccctctgtaacaattggacaagctatattagaatctggctggggaaattctaaacttacaaaacagagtaataatttatttggtataaaagcagataaagcatggaaaggaaaaagtgtagaaatttcaacttcagagcattataatgaaaaaattgtagctagttttaggtcgtataattcattacaagattctgtcaaagaccacagtttatttttaattaataataaaagatatagaaaacatgggttgtttgaggcaaaagattatattagtcaagctcaagcattagaaaatgcaggatatagtacagcagaagataaaaaaggaaatcgtatatatgcagagctattaatagatattattaggagttataatttgcaattgatagacaataaagttgagacaaaataattgttaactttatatgaggagataacaagataagattcttttctacaaaaagaatagaaaaattgtaaaaaaaactaaaaaaatgtattgacttgttatttaaaaggtgatattattattactgtactcgaaagagaacaaaatgaactttgaaaattaaacagtaggttaatttataaacaagaaacaaaccataaagccagatattttgataacaatagtatctgagcctgataaacttttatttgagagtttgatcctggctcaggatgaacgctggcggcgtgcctaacacatgcaagttgagcgatttacttcggtaaagagcggcggacgggtgagtaacgcgtgggtaacctaccctgtacacacggataacataccgaaaggtatgctaatacgggataatatatttgagaggcatctcttgaatatcaaaggtgagccagtacaggatggacccgcgtctgattagctagttggtaaggtaacggcttaccaaggcgacgatcagtagccgacctgagagggtgatcggccacattggaactgagacacggtccaaactcctacgggaggcagcagtggggaatattgcacaatgggcgaaagcctgatgcagcaacgccgcgtgagtgatgaaggccttcgggtcgtaaaactctgtcctcaaggaagataatgacggtacttgaggaggaagccccggctaactacgtgccagcagccgcggtaatacgtagggggctagcgttatccggatttactgggcgtaaagggtgcgtaggcggtctttcaagtcaggagtgaaaggctacggctcaaccgtagtaagctcttgaaactgggagacttgagtgcaggagaggagagtggaattcctagtgtagcggtgaaatgcgtagatattaggaggaacaccagttgcgaaggcggctctctggactgtaactgacgctgaggcacgaaagcgtggggagcaaacaggattagataccctggtagtccacgctgtaaacgatgagtactaggtgtcgggggttacccccttcggtgccgcagctaacgcattaagtactccgcctgggaagtacgctcgcaagagtgaaactcaaaggaattgacggggacccgcacaagtagcggagcatgtggtttaattcgaagcaacgcgaagaaccttacctaagcttgacatcccaatgacatctccttaatcggagagttcccttcggggacattggtgacaggtggtgcatggttgtcgtcagctcgtgtcgtgagatgttgggttaagtcccgcaacgagcgcaacccttgtctttagttgccatcattaagttgggcactctagagagactgccagggataacctggaggaaggtggggatgacgtcaaatcatcatgccccttatgcttagggctacacacgtgctacaatgggtagtacagagggttgccaagccgtaaggtggagctaatcccttaaagctactctcagttcggattgtaggctgaaactcgcctacatgaagctggagttactagtaatcgcagatcagaatgctgcggtgaatgcgttcccgggtcttgtacacaccgcccgtcacaccacgggagttggagacgcccgaagccgattatctaaccttttggaagaagtcgtcgaaggtggaatcaataactggggtgaagtcgtaacaaggtagccgtatcggaaggtgcggctggatcacctcctttctaaggagaattacctactgtttaattttgagggttcgtttttacgaatactcaaaattagcactttaagcaacagaataaactgaacgcatgtgaagtttgtttgttggcgctgtgcgttagcactttaagcaacgggatttatccgttggcgctgtgcgttagcactttaagcaacggaatttattcgttggcgacgtgctttagcactttgaaaactgcatatatatttagtgatatgacatctaatttgtaatatataaagctgataacttttaaaaattatcaagttgatagactttaatctatcaaacctttttaactggtcaagttattaagggtgcagggcggatgccttggcactaggagccgatgaaggacgtgataagctgcgataagcttcggggagttgcacgtaaactttgatccgaagatttccgaatgaggaaactcacttagagtaatgtctaagtatcattaagtgaatacatagcttaatgaggggaactcagggaactgaaacatctaagtacctgaaggaagagaaagaaattcgattccgtaagtagcggcgagcgaacgcggattagcccaaaccaataaagttttctttattggggttgcggacatatcataacgaagaggtatcgtaattgaagaggtttggaaagacccaccacagaaggtaatagtcctgtatgttaaacgagaagacttcagatatgatccagagtaccacgggacacgtgaaaccctgtgggaagcaggagggaccaccctccaaggctaaatactacctagtgaccgatagcgtatagtaccgtgagggaaaggtgaaaagaaccccgggaggggagtgaaatagaacctgaaaccctgcacttacaagctgtggaagcacatttcttgtgtgaccgcgtactttttgtagaacgggccaacgagttacgttaagtagcaaggttaagcacttaaggtgcggagccgtagcgaaagcgagttttaactgagcgttcagttacttgacgtagacccgaaaccgggcgacctacccatgagcaggatgaagcgaaagtaaaatttcgtggaggtccgaacccacgagcgttgaaaagctcggggatgacttgtgggtagcggtgaaattccaatcgagcccggagatagctggttctccccgaaatagctttagggctagcctcaaggtgagagatacggaggtagagcactgaatgtcctagggggtattgcacctaccgaagactatcaaactccgaatgccgtcatcttatacttgggagtcagactgtgggtgataagattcatagtcgaaagggcaacagcccagatcgtcagctaaggtccctaaatgtaagttaagtggtaaaggatgtgggattgcacagacaaccaggatgttggcttagaagcagccactcattcaaagagtgcgtaatagctcactggtcgagtgatcctgcgccgaagatttccggggctaaaacttactaccgaagctacggcatcagtaatgatgggtaggggagcttcccatacgggttgaagcatgaccgtaaggacatgtggacagtatgggagtgagaatgttggcatgagtagcgagatgtgggtgagaatcccacaggccgtaaacccaaggtttccaggggaaggttcgtccgccctgggttagtcgggacctaagctgaggccgaaaggcgtaggtgatggacaacaggttgatattcctgtactaccgataaccgtttgagagaagggatgacacagtaggataagctaagcacactgttggttatgtgtgcccaagcattgaggcagtcaaagtaggcaaatccgctttgataatgctgggatgtgatggggagcgaaatttagtagcgaagtagctgatttcacactgtcaagaaaagtctctatcgaggttaaaggtacccgtaccgcaaaccgacacaggtgggtgaggagagtatcctaaggccagcgagagaactgttgttaaggaactcggcaaaatgaccccgtaacttagggataaggggtgccaccatcaggtggccgcagagaataggcccaagcgactgtttaccaaaaacataggtttctgctaagtcgcaagacgatgtataggagctgacgcctgcccggtgctggaaggttaaggggatctgttagagcaatcgaagcagtgaacttaagccccagtaaacggcggccgtaactataacggtcctaaggtagcgaaattccttgtcgggtaagttccgacccgcacgaaaggcgtaacgatttgggcactgtctcaacaacagactcggtgaaattgtaattccggtgaagatgccggatacctgcgacaggacggaaagaccccatggagctttactgtagcttgacattgggtcttggtactacatgtacaggataggtgggaggctttgaaaccaggacgccagttttggcggagccatccttgggataccacccttgtagtactgggactctaaccataggccatgaatctggtcttgggacactgtcaggtgggcagtttgactggggcggtcgcctcccaaaaggtaacggaggcgctcaaaggttctctcagtacggtcggaaatcgtacgtagagtgtaaaggcaaaagagagcttgattgcaagacatacaggtcgagcaaggatgaaaatcggacttagtgatccggtggttctgcgtggaagggccatcgctcaacggataaaagctaccctggggataacaggcttatctcccccaagagtccacatcgacggggaggtttggcacctcgatgtcggctcatcacatcctggggctgtagtaggtcccaagggttgggctgttcgcccattaaagtggtacgcgagctgggttcagaacgtcgtgagacagttcggtccctatccgtcgcaggcgtaggaaatttgagaagacctgtccttagtacgagaggaccgggatggacgtacctctggtgtaccagttgtcctgccaagggcatggctgggtagctatgtacggaatggataagcgctgaaagcatctaagcgcgaagccaacttcaagataagatttcccaccgcaagggtaagaccccagaaagactatctggttgataggtcgaaggtgtaagtgcagcaatgtatttagcttatcgatactaataggtcgaggacttgaccaatatttatttgatgttcattcattaggatatatatgtagtttttagggtgctaactctaaaaaattagttttactaatttataaaaatttaatgcgggtgtagctcaatggtagagttctggccttccaagccagctgtgagggttcgatccccttcacccgctccaaaagattatgtggttacaatagcagagaggatacacctgttcccattccgaacacagaagttaagctctctagtgctgatggtacttggtgggaaactgcctgggagagtaggacgtagccacgtaatctttttttgttgtattaaatttaataaacctacaattgttatatgtttttatttgtcttttatagatttttttggcaataaatgatatagtgaagataattaaatatattcaatatatttaatttttttattttttgtttttataatttttttagaagtttattttttatgtaattatttataattttgggtaaaaacactttgatataatttcaaaaattaaaaggttaaaaaacaaagtagaaatttatgttaaataaggagattaatatgagaagaaatacaaaattattaacaacagggattctttcaatggcaatcgtcgcacctacaatggcatttgctactgaatctaatgctatggaaaataacgctgatttaaatataaacttagagaaaaaaagtatcgttttaggtagcaaatcaaaagtcagtgtcaagtttaaagaaaaaccagatgcagatagcattacattaaagtataaatgctatgatatgccattggatacaactctaaattataatcaatcaactgagtcatatgaaggaactatcaattataataaagacccagaatatttaaatgtttgggaactacaagggataacaataaacagcaaaaataatcctaaaactttaaacaaacaagaactagaaaagatgggattaaatttaaaagactataatgtaacgcaggaatgtataattgaagatataacttctagaaaagatgtaaataaatatttaagaaaaacttctgcacctattacagaacttacaggaagtgatagatacgaaacagcagttaaaataagtaaagaaggctggaaaaatggttcagataaggtagttataataaatggggatgtaagtatagatggcattatatcaactccactagcaactacatataatgctccaatacttttggttgaaaaaaataatgtacctaatagtgtaaaatcagaattaaagcgtttaaatcctagagatgtaattataattggagatgagaatgctatttctaaaactactgctaatcaaattaaatcgactgtaaatgctagtcaaacacgtctaaagggctctaatagatatgagacatctttattgatagcaaaggaaatagataaaaatcatgatgtggaaaaagtatacataacaaatgctaatggcggagaagtggatgcacttactatagcagcaaaagcaggtcaagacaagcaaccaattatattaactgataaaaatagtattacagacaacacatataaatggttaaagagtgaggatttacaaaatgcttattttataggtggacctcaaatgatatcaacaaatgttataaataaggtaaatgatataactaaagataatgttactaataatagagtatatggagcagatagacacgaaacaaatgcaaacgtaataaaaaaattctatacagatgatgagttagaggctgttttagtagctaaatcagatgtacttgttgatgctttagcagcaggtccattggctgcgaacttaaaatctccaatacttataacaccaaagacgtatgtatctgcataccataaagataatttagaagctaaatcagctaataaagtatataaaataggaggaggattgacttctaaggtaatgaactctatagcatcatcattatctaaacacaatacaactccaacagaaccaggaaatagtgggggtaagacagttatgattgacccaggacatggtggttcggacactggaacaacaggtaaaccattagggggtattaaagaaaaagactatacattaaatacttcacttgcgacaactgaatatttacgttcaaagggattcaatgtaataatgacaagagacacagataagactttatctcttggaaatagaactgctttatctaactctttgagaccagatttatttacgagtatacactataatgcatctgatacaactgggaatggtgtagaagtattttataagcttaaagataaagatggagggactactaaaactgtagctacaaatatattaaatagaatcttagagaaatttaatctaaaaaatagaggtgcaaaaacaagaacactatcaactgaccctacaaaagattatttatatgttttaagaaataatgatatgccagctgtacttgtagaatgtgcatttttggataatgagaaagatatgagtttacttaatacatcaaataaagtaaaagaaatgggtacacaaataggtaaaggcatagaagattcattaaaatagtctacaatgagagcatagaaaaatttaaaataaattaatctgcaattttaaatttaaactaaagctataagataagaatgtaattataatagtaataaagactgtatatacattgtgcatataagtgcgaaatgaggtatatacagtctttttatgattaattgtaaaaggatttatattatatgaagaatttacatatcttaaggctacagttaattgtcaagagttggagtattcatttgtaatacacaataaaagcttaattactatattttattgtgtgtttgtgtgtttgtgtgttttttgtggatttttatgtcaataaatgatatagtatagataattaaatgtattaaatatatttaatttttttattttttgagttttataagtttatttttatatattacttatatattatttatattttgggttagatacactttgacatattttcaaaagttaaaagattaaaaataaagtagaaatttatgttaagtaaggagattaatatgagaagaaatacaaaattattaacaacagggattctttcaatggcaatcgtcgcacctacaatggcatttgctactgaatctaatgctatggaaaataacgctgatttaaatataaacttagagaaaaaaagtatcgttttaggtagcaaatcaaaagttagtgtcaaatttaaagaaaaaccagatgcagatagcattacattaaagtataaatgctatgacatgccattggatacaactctaaattacaatcaatcaactggggcatatgaaggaactatcaattataaccaagacccagaatatctaaatgtttgggaactacaagggataacaataaacagcaaaaataatcctaaaactttaaacggacaagacctagaaaagatgggattaaatttaaaagactataatgtaacacaggaatgtataattgaagacataacttctagaaaagatgtaaataaatatttgagaaaaacttctgcacctattacagaacttacaggaagtgatagatatgaaacagcagttaaaataagtaaagagggctggaaaaatggttcagataaagtagttataataaatggagatgtaagtatagatggcattatatcaactccgctggcaaccacatataatgctccaatacttttggttgaaaaaaacaatgtgcctaatagtgtaaaatcagaattaaagcgcctaaaccctaaagatataattataattggagatgagaatgctatttctaaaactactgctaatcaaattaaatcgactgtaaatgctagtcaaacacgtttaaatggttctaatagatatgagacatctttattgatagcaaaggaaatagataaaaatcatgatgtggaaaaagtatacataacaaatgctaatggcggagaagtggatgcacttactatagcagcaaaagcaggtcaagacaagcaaccaattatattaactgataaagatagtattacagacaatacatataaatggttaaagagtgaggatttacaaaatgcttattttataggtggtcctcaaatgatatcaacaaatgttataaataaggtaaatggaataactaaggatagtgttactaataatagagtatacggagcagatagacacgaaacaaatgcaaatgtaataaaaaaattctatacagaggatgagatagaggctgttttagtagctaaatcagatgtacttgttgatgctttagcagcaggtccattggctgcgaacttaaaatctccaatacttataacaccaaagacgtatgtatctgcataccataaagataatttagaagctaaatcagctaataaagtatacaaaataggtggaggattgacttctaaggtaatgagctctatagcatcatcattatctaaacacaatacgactccaacagaaccaggaaatagtgggggcaagacagttatgattgacccagggcatggtggttcagcacctggaaattcatctggaggaatgattgaaaaagattacaatttaaatacttcacttgcaacaactgaatatttacgttcaaagggattcaatgtaataatgacaagagacacagataagactttatctcttggaaatagaactgctctatctaattcattgaaaccagatttatttacaagtatacattataatggctcaactaataaacaaggtcatggtgtagaagtattttataagcttaaagataaaaatggggggactactaaaactgtagctaccaatatattaaatagaattttagagaaatttaaacttacaaatagaggtataaaaacaagagtacttcctagtgattctacaaaagattatttatacgttttaagaagtaatgatatgccagctgtacttgtagaatgtgcatttttggataatgaaaatgatatgagtttaataaactcatctgcaaaagtaaaagaaatgggtacacaaataggtaaaggaatagaagattcattaaaataaatggaaataaaaatatttaaaaacttaatgtaaatttatactaaagtcaaaaaatgaaatataagtgtatcaatagtaagactgtatgtacatttgcacatgtgaatgcaagtatatatacagtctttttttgtagttaaatgcaataatttgattgtgttttgtaaaatacacaatatgatataattagataatatacacttaatttaattgaggaaggtgattatatggaatatttatttgaaaaaagtagtttaaaagaatatggaaatgaagctttagataaatatagagaattattagataaaactgataataattcaaggtgtattcttttattagtaccaaacaataacacaaagatacgatatgaaagggctctaagattaaattatagtgaagaactgaaaataacaacatatataagttttgtgaagaaagaattagttaaatactggccactaataatagaaaaatgtgatgaaataaatacaaaggttgtatctccaacatttatatcaaatagtttaagtgaatatttaatagtgcaaaaagttaaggaaaaaaggatacaagaaggatattttgaagatattacaggaaccaataaatccatagcaaatagtataatgactaacataaataaatctgcatttaatttaattgattttgattttattggagaaaaaatatattcatcaaagaaaaataaagatagtatatatagattttcatacactcagatggatgaaattatatcatattatataaattcgttactatcaaattcaattttagataatgcattaagcatatatttatacaatcaatacctacttaatgatgatttttatttaaaaaacttatttacagaagtgagatatataattgtggatagtcttgaaagctcaagtaatgcagaagttgattttataacagaagcattggataatacattacaaagttatatatattttgattatagtagggattattctgtatttaataatgtggatatagactatataaatgagaaaataatatcaaaaattaagcctaaagaagaaaatattaaaaagaaggagattagaatagaagatttatacttattacctgcaaatatagaattaaatcaatcaagtcaattatacaatgaaatgttagatttaataagtgaaaaagttatatctcttatagaagaaaatgtatctccaagagatatagcaattatatctcctataaacaatagtatattggagcatcaaattagagattctttgatagaaaaaaatatagatgtttttagtactaagaaggataaaaaagctgtagattatccatatgggaatgcattggtagtggctacatgtatattttatggatatttagattttataaaagatgatgaatacttaagctttttagaaactcttttagaaataaataggataaaagcatttaagatttttaatgaaacaagacatttaagtattgataatatagatgaacatagtcagtatcgtgatattttacagtatattgaagaaaaaaagaagagtgatataaaaatacatgaatttttaactcaattttacatagataaaatgttaaatttaaaagaaggtaaaaagaatgttgggttatgtaaaaagataatagctgaaagtgagtcttttagtgaaagtttaagtctacttaggatgaaaaaagaaaagatatttatagaagctttaaaaagtacaataaacgattattactctgttgtcgatatagaagagttgaaatccaaagacaaaatagtaataactactccttattcatatatatcatcaaatatagatagaagtatacaaatatgggtagatataggaagtaatgcttggaatatgaaaatagaaaaagatataagtaatttaattgtacttagaaaatcttttgaagaaaaaaagatttatacaaatgaaatggaagaatattataaaaaatattatctatacaatacagtatataatttgttattaaatgcaaagaaaatctatgcatttaaaagtgaatatgcgattaatggttatatccaagagagtatattatatagtatacttttaaaaatctcacataaaggagataaaaattatgattaatataaattatagagaagaccagataccaataataaattacgataatggtactatggcagtaccagcagtaccaggtgctggaaaaacatttataataacaaatttagtagctaaactattacttgaacagaaacataagggtggtaaaatattaattcttacatatatgaatagtgctgtaaataattttaaaggtagaataagaaagattcttgaagagaataaaatagatgatactaattcgtatgaagtaatgactatacacagtttggctgtaaaaataataaaggaaaagccagaagttgtaatgttaagtgaggattttaacatagctgacgatttgcaaaaaagtattatattaaatgaatgtataagtagatttagatttgaaggtggagaaagagcttttagatggtttttaaaggagcaaaaagatgaacgctggaaagaaatagctcttgaagcctgggaaagaggtttttttgaatttgcaggaaatgcaataagtgaacttaagtataagggaatttctccagataaacttgaagaaatattgtcaagaggacacaaaggaatgcttaaaattattttaccaatatataaattgtatgatagaaaattaaagcaaaatggattgctagattatgatgatatattaattttagcagaaaaaactttaagcttagacgaagggcttagaaagaagtttcaaactagatacaaatatatatttgaagatgagtgtcaggactcaaatgaaattcaaggtaatataataaaaattatatctagtgaaaataaaaacctagttagagttggagatataaatcagagtataacaggaacattttcatcatcagaccctaaattttttaaagaatttataaatagtgcagatttctgttataggatggatatgtcaaatcgaagttcaaaagatatacttgatttagcaaacactcttgtcaagtatgttacaaaggaatttagacaagaagaatgtagacatgctcttgaagatatgcaaataaaaactgtgccaaatggaatgggatataaagaaaatcctaatccagaacattataatataaatgtaaagtggtatgagagttggaaaattgaaatagagcaaactgctagatacgttaagggtataaaaaataaatatccagataaaagtataggtatattggttccatttaatgaacaagtgacacaagttgctaaagaacttagagagaataatctaacctttgaagaattaggaccaaattctttgaataaaaggaaggttataaacaacatagcatatattattgattttatgttacattgtgatgatgtagaaaagttaatagttgtacttaataaagtttttatagatactgataatgaagaagaaataaagtattttttagaagaattaaaaaactattctaccgaagaaattatttataattttgaatttagtaagttagataatgatttaatagaatttaaagaagaaagtgacatatatttaagttttaaaagaggaatagatattataaaacagatattagaatatccaataataaggttagacctcttagttttgtttattgggaaaaaacttaatttagaaaaagaagataaagctgtactggattatatatctttttatataaagtatctaatatcagaaaatataaatatggatttagaagatgtatataatttattgtttgatgtaaagaatagggtgtttaatcatataatagatgtggtatatgagataaatggatatgaaccagagcccggtagtataacactatgtaactatcataagtcaaaggggatggaatgggattgtgtgtttttactaggtcttgttgaatataatttccctgacaatattaatcaaaagtttcagagtgataaatggtatctaaaagaaaaatataaaaaccctatggcaattattaaatcagaagttgaagctatattaaaaggaagtatttcaacagattatgctcataaaacgaagattgattctataaatgaaaagattagacttttatatgtagggattactagagcaaaggaaatgttagtactttcaggaagtgcttatagagatgaaagtgatatagggaataagagaaaagagcaaaaaccatgtatatatttaagcagacttaatcaacatattattgaaaaaaggtcaaattaatatataataagttattaaaagattgcttgaaatatatctaaaaggggataaaacaatatgtacagtaagtaactactaaaaaataaagttaagagagaagtgatatgagtgaacgataaattaaaatatttttcttatagtcaaaattcaatcaacacatataaatcatgtccattgaaatttaaatataaatatattgatagaataaattggaaaaatgatgatgttggtagtagagagtattatgaaactttaaaaacaggaagagattttcatttgatttgtgaaagatattttagcaatatacctcttggaatctattttaatgaggatgataaaaatagtaaaaagtttttaaagtggatggaaaatataaaaaaagttgttcctattgaaaaaggaaaaacgtatttgccagaatatgaagtaaggatgaccttaaatggggatataatacaggcaaagtatgatttagttgtaattggaaataacaatatagaaatatgggattggaaaaccgagtctaaaaagattgactataaacacgtagaaaatagaatacaaactattgtttatatgtttttagcaaaagaagtaatacctaaagttttaaaaatggacataaatgttaaagatataaatatgagatattatcaacctgaatttgatgacttaccaattaccattttatatgatgaagaaaaacatgaagcaaatagaaataaaattcaaaattatataagtatgataaaaaacactaattatgaagaacatacatacgaagacaatctatacaatgatatagaaaaggtatataataaagaagaacgtatgtgctatagaaataaaaagcattgcaagtattgtgaatttaataagttatgtaatggcaaagaaatagattatagtattttggaggcggaaatttatgggacttaggtttgtattaggtagaagtggaagtggaaaatccacctatatactagatgagattaaaaaagaagctcaaaaaaatgaaacgacatcaattatacttttagttccagaacagtacacatttgaggctgaaaatagagtaagtaagctattcttaggaaaagaaaaagataagtatctaagagttagggtacttagctttaagacactaagtaatatagttttttctcaagtaggaggattgacagatgtaaatataaattctagtggaaaagcaatgatggtatatagagctattgaagatgtaagtgaagaattaaatgtgttttcaaaatcaaaatcgcagtctggttttgtaagctcaattacagatatgatatcagaaatgaaacaatacaatataagccctgaaatgttagaaaatatatctggagaattggataatgaaactttaagtttaaaattaaaagatataagtaaaatatataattcttttgaagggaaattgcatgaaaattatgtagatgctcaagatatgttaacttcattggcaagtaaaattgaattaagcagttatttagatggagcttgtgtttatatagatgaatttacaggttttacaccaaatcagtacaatgtcataaagagtatattaaataagtctaaaagtgttaatatctctttgactgtagatgatatcaactatattgggtacagtaaatctgatatgttttctagaacgaaatttacttattcaaaattgactcaattgtgcaacgaagaaggcataaaaatattgccacaagtaaatttaaacacaggtgttataaaaagatttgaaaaagttaaggaattacagcacctagaaagattttataatgcttatccatataaaatatattcaaatccaactgaaaatataaagataaaagagtttaacaatttatattcagaggtggaagagatagccagagaaattgtacatttagttagagataagaatgtaagatatagagatataaccattgctacaagagatttaaatagatatgattttttagtacactctatatttaatgaatataatataccaaactttatagataagaagagagaggcaaaaagtaatccaatagttattttaattatttcagctttagaaatgaagaatagacgatatgggtatgaaactatgtttaggtatttaaaaagtggacttataggaattgataatgatgatataaatttactagaaaattatgtgttggctaatgggattaaaggtaaaaaatggtttgatgaaaaatgggattatagaataacacaaagtctttcaggtcaagaaagtgaatttgaactggaattaaaagaaaaaataaatgaaataaaaaatagagtattagagcctatagtaattttacaagaaaaattaagaggaaaaaatagagtaaaagaaatctgtagatatatatatgaatttttattagatataaatatgccagaaactatagaaaatttaatagtaaattttaaggataaaggggaacttgatgttgcaaatcaatactcacaagtttgggacatagtagtggacatattagaccaaatggtggaacttatgggtgatgaaataatttctttagaaaaatttataaaattaataaccttaggctttgatgaatatgaattaggactggttcctcctagtatagaccaggtacttgtaagtagtgtggatagaatgaaaaatccagacacgaaatatttatacctagttggaactactgatggtgtgtttccactgattacaaaggatagtggaatattgagtgataatgatagggaaagtcttggaaacaaaggaatcgaagttgatattgatagtaagactaggagttttgaagaacagtttcttgtatataaagctcttacttcgacatctaagaatttaaccataacatatccaatatcagaccatgaaggtaaaacgcttagaccatcaataattatatcaagacttaagaagatatttccaaatatagaaaataaaagttatttagtggaagaaaataaaagcactgataaagatatacttaaaaaaataacggttaaatcccctacatttaatgaacttataaacgtaataaaaaattatgacagtgatgattacaatacagaagagattaatagtatttggttagatatatataggtactatttaaaagatgaaatctatagttctataacaaaaaaagttataaaaggtcttagttatactaatcaagttcataagattgaagagaaaaaaataaggtcattgtataaaagtaattctcttagcatatctaggcttgaaaaatatgctgaatgtccatttgcttattttatacaatatggtctaaaagcaaaaaagcgtaaagagtattcatttacaccaccagatttaggaacttttattcataatattttagataggttttcaaaagaacttttacaagataatttaacttggagagatattgatgaaaaatatatagaattaaagataggtataatagttgatgaaataattttaaagataccaggatatatattaaatagttctgagaggtataaataccttgcatatagattaaagaatatgttgacaactgctataactataattagtcagcaaataaaacaaggttcatttgaaccaatagattatgaagttaaatttggcgacaatggaaaatatccacctataaaaatggtgttagaaaatggacaagaagtaagtttaattggacaaatagatagagttgatgaatttgaagaaggagaaaataaatatataagaataatagattataagtcaggcaataagtccataagtctaacagaaatatattatggtctacaattacaattacttgtgtatttagatgcaatccttgaaagtgcaaaggatgaagatataaatataaatccagctgcaatactatattgtagaataaataatccaatagcaaaatttaatgaagataaagatgatgaagaaatacaagaagcaatattaaaagaacttagaatgaaggggcttgtagtaaaagactctcacatagttaaagagatggataaatcattaatagatggagaaaggaaaaactctttagtaataccagtaggtcttactaaggatggaaatgtaggtaaaagtacttcagcaataagctatgaggatttcaaactgcttagaaaatatgtaaggcatgctataaaggatttatgtgaagaaatgttaagtggagaaatacgtatagctccatataaacataaagatggaacatcatgtgacttttgtgattactctactatatgtcagtttgattcaactataaaagataacaagtataaaaatttaaataataagagtaatgaagagataataaaaatgatgaaaggagatgttaattagtgagttctcctaaatggacaaaagagcaattagaagttataggaagtagagaatgcaatttattggttgctgctgctgctggttcaggaaaaacagccgttctagttgagcgtataattcaaatgataacaagtagagaaaatccaattgatatagataagttattagttgttacatttactaatgctgctgcgtcagaaatgagagagaggataggggatgctataggaaaagccttagatgaaaacccagaaaataaacatttacaaaaccaacttgttttattaaataaatctagtattacaacaatacactcattctgtttggatgttataaaatcaaactttcatagaataaacttagaccctaatttcagaataggagaccaaactgaatgtgctattttgaaacaagaagcaatagaggaagtatttgaagatttatatgaagaaagagatgaggggtttttaaatttagttgaaagttatgcagaaagaggaggagataaagaagtacaagatattatcttgggaatatattcatttgcaatggcttctcctgaacctaaaaaatggttgattgactcagcagaacgatttaatattgatgaaaattttgatttttcacagtctatttgggctagagctatattagacactgtaaaaatagaaattaatggtctttgtctaaatatggaaagggcattaaaagaagtggaatcaatagaagaattagaaacttttgcagaaaagttatccgttgaatataaaaaaattgctaacatttcacaagcatgtaataaatcttgggatgaggcatataaaaagatggcaagtatgtcctttgaaaattatgtaaaaggagtaaaaagaatttcaaaagatgctccttcgtatataaaagaatcaaaagaaaaggcaaaaactataagagataagactaagaagtctttagaaagtatagtaagtgctacattcaataaagataatgattctattagagaagaaataaaatatctttataacatagttaaaccaatatctagtgttgtactgagatttgaagaggaatatagcaataagaaaagagaaaaaggaataatagattttaacgatatagagcattttgcattaaatatacttacagatatagatgaaaaaggtaatattgtaccttctgatatagccgttggatatagaaacaagttttatgaaatatttatagatgaatatcaggatagtaatctagtgcaggaagtactgcttaaagctgttgcaaatacagaaactccaaatagatttatggttggtgatgtaaaacagagtatatatagatttagacaagcaaagccagaattatttttgcaaaaatataataactataatgataaaaagggaagttcccatagaaaaataatgctttacaaaaattttagaagtagagaagaagttgtagatgctgtaaattatatatttgaaaatataatgaatgagaatataggagaaattgaatatacagaaaaagaaagactaaatttaggtgcgaattttaatgtggatacagacgagaaatctattattggtggagcaacggagatacacctaatacaaaaagataataaacttgatgatgatattataaatgataaagacgatagaattaataacaaagaaaatgaaatagaggaagaagaaaaattagataatatacaacttgaggctagaatggttggaaacattatcaaagatttaatgaaagtcaatgaagatggaaaaattcaaaaggtctatgataagggaatagatggatatagacctgtggaatttagagatatagttattcttttaagagctacatctgcatgggctccagtgtttgcagatgaattgatgaatatggatataccaacatatgctgatgttggagtggggtattttgatacgattgaaataaaaacaatattgtcattacttcaaataatagataatccaatgcaagatatacctcttatatctgtattaaaatcacctatatttggatttacaccagaggatttgattgatattagagttcagagtaaagataaaattttttatgaggttttaaaaagtacagcagagtatgatggatttacagattctcaaaatgaaactgagtctgagtttataccaagtgaagagtgcataaacaaaagtaaagattttttaattaagctaaaggaatttaaagaaaagtcaatgtacatgagtacagatgaatttatatggtacttgtacacaaggactggatactatgcttatgttggagcattgccaggtggaagtcaaagacaagctaatttaaaagtattgtttgagagagcaaaacaatttgaagaaaccagtcttaaaggaatattcaactttgtaaattttatagagaaattaaaaaaatctagttctgatatgggaagtgcaaaaacacttggtgagaatgcaaatgttgttagaataatgagtattcataaaagtaaaggtctagaatttccagtagtcatatgctctgcaatgggtaaaaatttcaatactcaagattttaaaaagagtattttatatcatcataatttagggtatggacctcaatttgtagactatgagagaaggatttcttttccaagtatagccaaagaagcattaaaaagcaaaataaatatagaaaatttatcagaagagatgagagttttatatgttgcatttacaagagctaaagaaaaattgattataactggttctactagaaatatacaagatagtataaagagatggtcaaatggaattgaaagtttagatacaatatcacaatacgagatattaaaaggtaaaaattttttagattggataatgccttgtgtattaagacatagggatttatctaatctactagaagaagtaggattagacgcagtttttaatgttgaacataattcaaaatggtatggaaagttgtggaataagaatgatattttagtggaaaagaagagtgatgaagaaaaagaaagtattgaagaaattcttgaaaaaatagatgtagatagtccggacagtgattattacagtgaaatagaaaaaaaattaaactatatatatccatatgaatttagtacaagaaaacctgctactatatctgttacagaaataaaaaagatacaaaataattatgaagaagagttaataaatactatatttgaacaaaaagtaatattaaaaaagcctctatttattcaaaatgaagaagaaagagaaaaaataagtggaacagaaagaggtacaatagtccatttggttatggaggttttagacttaaaaaatgtaagtagtgtaaatgatataaaatcacaaataagaggttttgtttcaaaaggtataataacagaaaaacaagctagtatagtaaatccatataaaatatataaattttttgcctctaacataggaaaaagaatgttgaatgctgaaattataaatagagaaaaatcaatttatgcacaagtaaatatgaaagacatatatatttatgaaaagcttataaacaatgatgataaaaaactttatgataatgaaagtgtcatgttaagaggtatagttgatgcttattttgaagaagataatcaaatagttttggtggattataaaacagattttgtaaatgaggaaaatataaatcaaataatagagaaatataaaaaacagttggatttatatgcagatattattgaaactttaactggtaagtcagtaaaagagaaatgtatatatttatttggagttgatgaagctgtttgttattagtttttatatataaattaaacctaaaagatagaggaaggggaaaaaatgagatttattcatacatcagattggcatctagggaagtccctagaaggccattctagaattgaggaacaagcaaagttttgtgaggaatttataaaaatagtagaatcaaatgaaatagatatggttataattgctggagatgtatatgatacttctaatcccccagcacaagcagaaaaactattttatcagactgtatcaagacttgccaataatggtcagaggtgtgtattaataatttcaggaaatcatgataatccagagagactttctgcaataacacctctagcacatgaacaggggatacttatatatggttatccattaagtgctacgatagaagctaagtataaagggtttgaaataacatatgcaactcagggatgtacaaaactgaatataaatggagaaaatattgtgattgctacattaccttatccaagtgaaaaaagattaaatgaagttttttcaagtgaagatgagtttgagaaacaaaaaaattattctgaaaaggtaggagatatatttagaagtttagaagaaaattttagaagtgatactataaatatagccgtatcacatatatttgtaataggtggagagagtactgaatcagaaagacctatacaattaggtggaagttttttagttgaaagaaaagatttgccagaaaaggctcaatatactgcactaggtcatttacataaacaacaaaaagcttccgaacgtttaaatgcatactattctggttctccacttcaatatagcaaggatgaaagagcgtataccaaaggggcatacatagtggatataaaagctggagaaaaaccaataattgaagatgtatattttaataattacaaacctatagaagtatttaaatgtaatggaatagaagaagcactagatatatgtgagcaaaatcaagatagagagatttggtcatattttgaaataaatactgatgagataatatcacagaatgaaattaaaaaaatgaaggaactattaaaagacataatagaaataaaaccaataataacatcttgttatgaacaagaaagtgtagatataaaagaaaagtctatggcagagttgtttagagagttctattcttttagtaaaggtgtagagccaaaaggagaacttatggatttatttctagatataataagtgaagaaggtgaatcagcagatgagaccaattagattagaacttacaggacttaatagctatattgataaacaagttatagactttgaaaaattaattgaaagaggtttgtttgggatatttggaactactggaagtggaaaatctacaatcttagatgcaataactattgctatgtatggaaatatatccagaaatacaaaagaatatataaacagtgtgtgcgataaggcaattatatcatacgagtttgagataggaagcaaaaacactagaagaagatacattgtagatagaaccattgctagaagcaaaacaggaacaaagacctctaatgctagattaatagaagtattgaatgacaatatccaaaatgttttagctgataaagttgtggaagtaaatgaaaaagtagcacaggttgtaggattaacggcaaatgattttactaggtcagtagttttaccacaagacaaatttaatgagtttctaagattatcacgtgcagatagaagagacatgttagagagaatttttaatcttgagaaatatggaagaagtcttggagaaaaagtgaaaaagagaaaaaatatacagttacaaaatttaaaagatttgaaatcaaaattaagtcaatatgatggaattacagaggaagtatacaacaatataaaccaagaattaatagagttaaaaaatttggaaaaagataagaataatgctttagacctagctcaaaaatcttatgaagaaagtaaaacagtatatgaagaacaattaaagttagaaaaaaatgaacttagaaaaaatgagcttgatttaaaaaatagtgagataaaagaaaagattgctcttgtagaaaatgatagtaacgctaaaaaggtagacccatacataagttcagttcaaaatctagaaaaaaagatagatgaagatagctttgtagtaagtaatttagaaaagaaattagcaatattaaatcaggagcttgaagttacaaaaaatagatatgaaaaaataaacaaaattaagaatgaagaagtccctaaattgagtgaagaaaaaataagattgcaacaagcaataaaattagaagaagagttagttttattagatagagagttaaaagatctaaaagaaagtggaattaatttaaataagactaaagttgaattagaaaaagtaaagcaggtgtcagagtccagaaaagatgcagttactaaatctataaaagaagttgaaggaaagattgataaagtaaatataagtgcagaattaaaacaaaaaatatttctagcatatgaatacgagaaagattacaacaacgtattggaagaaaaaaatcaaaagctaaataaactagaagaaatactcaaagagacagaaaatataaatttaaaagttagatatattgataaagataagaatgatgtaaatcgtaatttagaaaatttatcacttcacttggatgttcttcttaaaaaatgtcctggtaagagtgctgatttacttttaaaatctgaatatgttactgaattaagaagtaaagcaaataatactaaagaaaatgaaattaagaaaagcagtatacaagatgaattaaagataatacttgaaagtaagtttaatactgaaagggaagtaaatttactaaatgaaaaacttgaaaataatagaaagaatagagatgacctagaaaaagaattagaagaactaaagtatttaaatttagcctctgaacttagacgtgaattaaaagaaaatatgccttgtccagtttgtgggtcaaaacatcatgaaaatcataatataactaagtatgatgaaaatatatcttttgtcaaagaaaaactggagaaattagaaaaagaaaaaataagtataagaaacaatatagaggaattaaatgctaaagtaagtgggtatttatctatagaaaaaatgaagactaaagaacttgaagatgtaaaaggaaaactaggggggattccatctagtcaattattaaaaaaacttgatgaagaacaaagaaaacttgcattgttaaaatctaatattcaggagtgggagaaagaaaaagagagtactgaaaataaagtaacattagctaaagaagaaaaaaataaaattgaaaaagaagaattaaaaataagagagagtctgaataattataagaaattaacaagagatttaaacatagaaatagaaggtttagaaaataaatgtaaaaaacttaaacaggaatacctaggattaaagacgattactaaagtctctaatctattgtcaaaagtaaaagaaataagggagaatgaaaaagaattagaattactaagtactgggcattcaaatttattaaaaaatagagactcactagatattaaaataagagaaaatgagagtaaactacatgaaatagagatagaattaataaaggctagagaattatatgtagaaaagaaattgagtagagataataagtataaagaagttattaacataacgaaaggtgatttagctaaaaatcttttacataatgttgaagaaaatatatgtaagatattagaacaagaagaatcaagtaagaaaaaattggaagagcaaagattagaatatgaaaaaaacattgctgaaaagcacaatatagatggtagacttaaaactgctaaggaacaatataaagaccaaaaatcaacactaaataaactattagcagaaaataaatttgaaagtatatatgcagtaaaaagagctttattagatactgatgcagtaaaaaaattgattgaagaaatactagagcatgaagaagaacaaaagttattatcatttaagataaaatcatcaaaagaaaaattaaatggaagaagcataaagaaggagtactttgaacagttaaaagatgaaatttataatttgaaagtagaaataggaaatatatccaaagatattggagctaatcaaaatcagttaataacactaaaagactctttagataagataaatgattttaataaacaacttaaggtagttgaacacaatgtggacttattggaagaattagataaatgtgtgcaaggaaataaatttgtagaatatgtttctacaaaccaattaaaatatatagcattggaagcatcaaaacgattggatggaataacaaaaggaagatatgcacttgaaattgactcaacactaaactttgtaatgagagataactttaatggaggagaaagaagaagcattgatactctatctggtggagagacattcttgacatctctatcattagcacttgctctttcatctcaaatacaattaaagggaagtgcaccattagaatttttctttttagatgaaggttttggttcattagatagtgaacttttagaaattgttatagaatccttggaaagattgcatagtaataatctaagtgtgggtataataagtcatgtcgaggaacttaaaaatagagttcctgttaagctattagtttcatctagtgaggctggaataggttcaaaagtaaaaattgaatatagttagaaaatatatggtaattgaatatattatctaatatttccaaataatatgtaattgtgatataataaaaactaatattaaagttatttataattaatattaatataaaaacatgtaagtaggagtgtggtaagtgttggaatcgcccaataatttgattcagattatttttttaatagtattacttatagggtctgcatttttctcagcatctgaaacggccttaatgtcgttgagtaaaatcagaatcagatatatgcaagatgaaggagttaaaggagctaagttagtaagttcattaatagaaaatccaaataagcttttaagttctatattggttggaaataacgtcgtaaatatagcagcaacatccatatcaacatctttgtttataggattaatgggagaaaaaggagtggcacttgctacagctgttatgacagtattagtattaatatttggtgagattactccaaaaacaatagcagcaaataattcagaaaaggtttctctattagtatctaaacctataaaagcaattatatttatattaagaccaatagtatggatatttaatataattacaaatattatatttaaattatttggtataacaaataaaggagctaaatcattcataactgaagaagagctaaaaactatggtaaatgtaagtcatgaagaaggcgtccttgaaatggaagagagagaaatcataaataatgtttttgaatttggagatatgcaagctaaaaatgcaatggtacaaagaatagatatggtagctatagatatggaagatagttatgatgagataatacaggtatttaaaactgaaaaattaagtagaatgcctgtgtatgaagaaactatagatgatattgtaggaatacttaatataaaagatattatatttttatctgatgaagaaatagagtcatttgatattaaaaattatatgagagaaccttttttcacgtatgagttcaaaaagataacacaacttcttgaagagatgaaacttgaaaaaagtcagatggctatagttgtagatgagtatggtggaacatctggacttttaactatagaagatttagtagaagtcattgttggagatatagaggatgaatatgatgaagaagaggatgaaatacaagttataaaagaagatgagtatattgtagatggaagtactaaaattggtgatgttaatgaacttattggtgtaaacttggaatctgaggagtttgattccataggaggttttataattggacacctaagcagattgccagaagaaaatgaagtaattgaagttgataatataagattttgtatagaaagtatagaaaaaaatagaattaaaaaaataagaatatatacataatgtaataatgttcttaaatttattagaagtgtataaatataaaagatatcttttatatttatacacttctttttattttgtattcaaataaaactagtatgaaatggacaaaataaaaatataaattagaagaaaggagatttttaagatgagcatactagaaaataattttttatacaaattaaaaaacaacactatctttttttgtatatatacattgttatttatttttatttacaaagcgtttccatacatagctccattttttctaggtgctataatagcacttatgattaatcctatatcacaaaagttagaaaataagtttcgtataaataaaggtatctctactcttgttctaagttttcttgcagtggctatagtcagtacagttactacaataatagtaataaattcaatgaaagaattaatgggatttttaaataatatatctgctaatcctgaggatataagtaatactattatgtattttttaaataaaataaatgactttatgaaatcatttcaagaaatagccaattttgatgtagaacaattagtaaacaaattcagtggtgaagtaatgcaaattacaaaaaatcttcttactagtatacttggattggctacttctattccatatattataatatttataattaccttgtttattgctacctactttatagcaaaagaccttgataagattgaaaatagtttttataatatgtttactgttgatgttagaaagaaggtaaaaaacgtaaagaaagaggcagggctttcacttgttggatatataagggcctatacaatacttatggctataacattttttgcaatctggggaagttttgctttatttggattgaaatacggtctaatagtagggtttgtaggagctttaatggatttaattccattcctaggtataataacaatatatcttccagtaattgtttattattttcttataaaaaattattttatagctataagtatgactgtgatattttttgttttgtctttgattagagaaatacttgaacctaaactagtatcagtaaatgttggactaaatccattagctaccctagcagcgatttttattggaatccaagtaaaaggaataattggagtaattttttgtttgggtttggtatgtatgcatgatatacttaagaaggtggatattttttaattataataattgatagatttttttaaaaataaaattttattcacaggtaaataaaaaaatattaatcttattaagaaagagggtatatacgtgaaacaaaaagtagtggaaagatttttaaaatatgtatcatttgatacaacatctaattctcagtgtgagaactgtccatcttcagaaggtcaaagagttttagctaagtatatagttgaagagctaaaaacaatgggtgttgatgatgtgagtttagatgaaaatagttatataatggctactttaaaaggaaatactgatggtgtggatactataggattcatatcacatttagatacaattgaagatgttagtggaaaagatattaaaccaagaataatagaaaattatgacggaaaagacatagttttaaatgaagcgttaaatgttattacgtatgtaaaggattctccagagttggaagaatttaaaggtgacgatttaatagtcactgatggaacaactctacttggctctgatgataaagctggtatagctgagatagtgactgcaatagagtatctaataaatcatccagaaattaagcatggagatataaaaataggatttacaccagatgaagaaattggtagaggtgctgatttatttgatgttgaaaaatttggagcaaaatatgcatatactttagatggaggaatagttggagaacttgaatgtgaaaattttaatgctgcaaatgcaactattactatacatggtagaaatgttcatccaggttcagctaaaaataaaatggtaaatgctatacatatagctgctgaaatatcagaaatgttcccagcagatgaaagaccagaaacaacagaaggatatgaaggattttggcatttaaattctataggtggaaatgtcgagaatgtaagtatggcttatattattagagaccattgtagagaaaaatttgaaaatagaaaatctattatgatagagaatatagaaaaaataaataagaaatacgataatagagtggaattggatttaaaagattcttattacaatatgaaagaaaagattgagccagttatgtttatagttgatatagctaaagaagctatggaggaattaggtataaaaccacgtttagttcctgtaagaggtggtactgatggagcaagattatcttttaatggattaccttgtccaaatatatttactggtggattaaacttccatgggaaaaatgagtgtataccagttagttctatggagaaagctactaaactaattgtaagaatagctgaaaaatatgctgaaagagtttagttaaaaagtatttaaaaattaagcatttaaagttataatagctatatcattctttataagtcaagctgattataagcttgtgttgtatttaaaatggtatagctatttttgtaattatttttataaaagataattatttttagtttagggtatcaataaaaagtatggatatcaataggtattaacatttaaaagggggaattgtattgaaaattaaatctaaaaaaataatagcatttgcactttcacttgggattatgttgccaagttgtgtatatgcagacactattagtaaaaatcaaaatgcacaggtagatatgaacaattatcttcaaggtagaaaatctccaaaggaggaaaaacttattggtgaagatagatttgatacagcgataaaaatatctcaaagtggttggaataatggttcagaaagggtgtttctagttaactcaaattcattgccagatgcattggcttcaactcctttggcaagtaaattggatgcaccaatactgcttacaaataaaaatagtataccatataatgtaacagaggaaataaaaaggcttaatccagcagaagttattttaattggaagtgaaggagctatttcatcaagtgtaaaagaatctcttgaagatatggaagtattagtcagtagaatcggtggagcagatagagaagaaacatctttacttcttactagacagctagatgatactggtgatttaggtgtctcaaaagtggcagtggttaatgggtataatggactggcagatgcaacttcaatatcaagcccagctgcaagtgataatacagctataatatatacaggtaaggatagcataagaagtgaggcaaagaattttattacacaaaactcaactaagacatacatagtaggtggggagtacagtataagtaaaaaacttgaaggacagttagtaaactcagaaagactagcaggaacagatagaaaagatactaatgcgaaagttttagaaaagttttatggaaaatcaagtaaggttaataatatgtattttgcaaaagatggaagtggtagagaagctgatttagttgatgggcttgctgctggagtattagcatcaaaaacaaagtcacctgtagtacttgcaagtggaagtttaagtagtgcacagaaaagttttataaaaaaagtaaaggctgataaatttgtacaagttggtggaggtaaaaatagtaaaccatatgcagaagcattagccttacagtaatattgtgtaaatcaaaattaatatataataatagcaagtaaaccaagttgaacttcaatatatataataaaataagtaaactaagttatatttcagtataatatataatgaaataagtaaactaagctatgtttaaatataatatataataaaataagtaaactaagttatatttcagtataatatataatgaaataagtaaactaagttatactccaatataatatataatagaaacaagtaaactaagttatatttcaatatagcatataataaaacaagtaaaccagattctatttaattagaagtttaaggtattgtacttaaacttctaattgagatagaaataaaatggtttacttgtttttattatgagtttaataaattaaagcttattttatttttattaaaaatttactaatcattgatatttattatatttccagtattgatgtcaattaagtttatatcaagttcaagctcatcctcatcatcagtttttatgatatctataattgcgacagaatggcttccatcttttgggatagaagtacttcctggatttattactattaaattatcatccatgtatagtttttttacatgagtatgtcctaaaactaatatgtcaccacccattttctttgctttgtcaataatttcttcttctgattctatataaccatgattcaatataattctaatttcaccaaattggctcatgacataaggactctgaataggatgttctataaccatctggtcaacatctgcatcacagttcccttttacaatcacaatgttttctaatttatttaatgtctcaataaattttttaggattatatccttctggaatatcatttctaggtccatgatataagacatctccaccatgtaataaaacatcacaatcagataatacatttaacgctttttcaaagtaaagtaagctaccatgagtatcactcattattcctattttcatattaaaaatcctcctaagtacagtctataaaaatttttcagatactctatgccaaaactcatagtttgacattctaagtaattttatttttgcatcagatatactaacttttatattttcgatttgtctaaatctgtgctcaactccatcaacgacaatcaatacagaatcttcaaatctatattctggtgcaatctttataacagattcatttgaacatattatacttgatgtaaagcacctatatgcattggtatttatcggatgtaaaggtgtaatctgcataagttcaagatttatatcaacaatactacctccagcagaatagttataggctgttgaacctgtggaagtagaaataatcataccatctccactaaaattttgtatatgtttattatcaaggcttaaatttaggtgtatagtcctagacttgtctcctcttataacaacctcatttacagcaagcatattagaaccactagtagttgtatatacttccgcattaagaagtgacatttcttgaataatataatctttttttgtataagcttcaataaagctatcaatcttatctggtaaaatatcaggaaaaaaccccagatgacctgtatttattcccattatgggaatctcaggaaaatcgaaatctctaactgttcttaaaaaagagccatcaccaccaattgatataataagctctgtgtctggataaatatctgaatacacttcaaagccagcattgataagttttctagttaagagttctttagtctcaagggacttatttaattggtttgtatttatagttataattcttttcatatattcacctcttcatactttgtattataacatagttttataattcttaatttataaatttataaatgacctttgtagtgaatgtgttaaaatatgtataggtgggtataaaaaaatgcataagaggtgaagatgtgtttagcataaggaatatcacaaaaaaattaggaaaattcaagttaaataatataaacttagagttaaaggaaggggatattgttgggattataggaccaaatggttcgggaaaaacgactttaataaaaattataatggggattattgatgcagatgaaggtgaaattgaactttgtaatgaaactattgaaaattctccaataagctttaaaaacaatattggttttgtatatgattctttacaattttatccacatttaaaggttaaggaatttagaaaaatagtttctttattttataagaattttgatagagaaaaatttgatgaataccttaataagtttgacatagaagaaaatatgcatattgaaaatttatctaaaggtcaatctgagaagcttatgttatcaagcgcacttagtcataatgctaagttattgattttggatgaaccaactgctggtatagacccgattgtaagaactgaaataatgcagtacttacaagattttgtgaaaaatggaagtagtagtgtaataatttctactcataatactgataatttaattaaaattgctgattatcttgtttttataaatagaggaaatcagatttttactgttaagaaagaattaatagaacaagaatataagataattagggcaaataaagcagagttagaagcaattaaagaaagtatagttggtgttaaagagtataaatattataatgaggcacttgttaaagttggagatagcttgaaagtaaaaagcctattgatagaaattgataagcataaggtcaaaaatcctactatagaagaactaatgtattattatgtaaatgaggtgagaggatgttcaatttaataagaaaagatttaataataggaattagttcagatggtatccgtaatttaaagtacatattgctattttttgtgttttattttttccttaattcaatttcatattatacagtaagtattgttgttagttatttgatatttataaatacatttgagtgtgattatgaaaatgattcaaggatttttataaggagtatgccagttagtatagaagatatagtttactcaaaatatttattaggtgtaggactaataatttctgtaacaataattgtgtccttactaagtaaattgacatcactagtgttctttagaaatatggttttaaatgatgtatttttttctgtaaatatatttttagcaattttgacgattttactgcctttaatttttaagtttggatatggaaaaatgaaagtttgtggttttatagtaagtattttaatttactttgtatatggaagtcttttgaagatgattagtatgattgtatatcaagtaaagcattttaattatagtaaagttggaggagtatatctttcaaattatgtaactgatatagctaatactaagtatataaatttatatagtatgacatttttaacaataataatttttataatatcaatgtatttttctattaagatttcaaaaaagaataagtttaattattaaaattttaattaatattatagcacaatagcacaaaatataaggagactaaaaatgaagaagtttataaaagtttcattttttattttggggatttttacactattcatagctataaataaattagtatatagagatatggtaagtgtcaaagattatgaaataaatcatttagaggaaattgtttttgattttgatagcaggagaagtagagatatcggtactattgtaagatttaaaataagcaataatagtaaatatagttataaattaaacagtgctaaaatgaagtttgaaaattgtgtggaaaataaaaagggaatgaataagtgttctgcatatgtaaatgtagatttatttaatgaaaaaaattctataactgaaagtactctgaaatatggaataaaaccaaataatcaaggttatgttgattttgtaattccaaaaggactaaattttgattataggtactttaatgaatctggtatgagtgtagaatataaaggagaatatattgtcaatattccaatggcaaaaggactttatctagtagttggaaaaaataatgatacatggaatgctaatattatggaataatttgaaaaataaatcaattatagatataattaagaataatatgaaatttataaaaattcagactaggaggggtatttaatgtcaataagtaatgtaagagagtattttaaacaatttggcaaggaagacagtatattagaatttgaacaatctagtgctactgtggaacttgcagctgaagcagctggggttattccagcaagaatagctaagacactctcatttaaaataggagatgatgcaattttaattgtgacagctggtgatgctaagattgataataagaagtataaggctgaatttaattgtaaggctaaaatgttgacaccagaagaagtcttggagtttactggacatgctattggtggagtctgtccatttggtttaaaaaattctataaaagtctatttagatgattcaatgaagagatttgatacagtatttcctgcatgtggcagtagtaactctgcaatagaacttacatgtgaagaaatggagaagttttctaagagtgaaaaatgggtagatgtttgtaagaattggtaaaaaaatatagtaaactatagtaggaattagtaaaaaactacctctgtatacaatctatacagaggtagttttttgtgtaaatatttataaatctaagaggaaaatctaatttaaactaataatccaaaataaagttaaaaaattctgattttttttcgaaacaataaaaaaatgacaaaaaagtggaaaaaatgtaataaatattgttaaaaaaataattagaaattattgaaaaattatcctttgagtgttactattatagatgtaagatatttaaaaataaaaaatagtcagataaaaatacgattatttagctctattaaaataatttttatacgataaaaatcttctgtacatggctaaaaaacagatgtacagacaatatttaatgtttaatataccctaatataaatatcgtaaacaaattattttatctgtgaccagtgtgaaagaaatcttattctaacttgaaatttcacaaaattccaaaaagcgagattttttttaagtatagttgattttaaattaacaatttatgattaaattaatgtcataattggttagtataatcacatataaatatagagcgtagtttgattaaggttataaatttctcgacgtatattcaaataccttattatagatgttgccgagattttaattaataaatgaaaataaaatatttataaaatactgaggaggctattatggatttaaattctaaaaaatatcagatgcttaaagagctatatgtaagcttcgctgaaaatgaagttaaacctttagcaacagaacttgatgaagaagaaagatttccttatgaaacagtggaaaaaatggcaaaagcaggaatgatgggtataccatatccaaaagaatatggtggagaaggtggagacactgtaggatatataatggcagttgaagaattgtctagagtttgtggtactacaggagttatattatcagctcatacatctcttggctcatggcctatatatcaatatggtaatgaagaacaaaaacaaaaattcttaaaaccactagcaagtggagataaattaggagcatttggtcttactgagcctaatgctggtacagatgcgtctggccaacaaacaactgctgttttagacggggatgaatacatacttaatggctcaaaaatatttataacaaatgcaatagctggtgacatatatgtagtaatggcaatgactgataaatctaaggggaacaaaggaatatcagcatttatagttgaaaaaggaactcctgggtttagctttggagttaaagaaaagaaaatgggtataagaggttcagctactagtgaattaatatttgaggattgcagaatacctaaagaaaatttacttggaaaagaaggtcaaggatttaagatagcaatgtctactcttgatggtggtagaattggtatagcagcacaagctttaggtttagcacaaggtgctcttgatgaaactgttaaatatgtaaaagaaagagtacaatttggtagaccattatcaaaattccaaaatacccaattccaattagctgatatggaagttaaagtacaagcggctagacaccttgtatatcaagcagctataaataaagacttaggaaaaccttatggagtagaagcagcaatggcaaaattatttgcagctgaaacagctatggaagttactacgaaagctgtacaacttcatggaggatatggatacactcgtgactatccagtagaaagaatgatgagagatgctaagataactgaaatatatgaaggaactagtgaagttcaaagaatggttatttcaggaaaattattaaaatagataaatattaaaatatacacaataggtcgatattaaaatagatatggaggaaggatttatgaatatagtcgtttgtataaaacaagttccagatacaacagaagttaaactagatcctaatacaggtactttaattagagatggagtaccaagtataataaaccctgatgataaagcaggtttagaagaagctataaaattaaaagaagaaatgggtgctcatgtaactgttataacaatgggacctcctcaagcagatatggctttaaaagaagctttagcaatgggtgcagatagaggtatattattaacagatagagcatttgcaggtgctgatacttgggcaacttcatcagcattagcaggagcattaaaaaatatagattttgatattataatagctggaagacaggcgatagatggagatactgcacaagttggacctcaaatagctgaacatttaaatcttccatcaataacatatgctgaagaaataaaaactgaaggtgaatatgtattagtaaaaagacaatttgaagattgttgccatgacttaaaagttaaaatgccatgccttataacaactcttaaagatatgaacacaccaagatacatgaaagttggaagaatatatgatgctttcgaaaatgatgtagtagaaacatggactgtaaaagatatagaagttgacccttctaatttaggtcttaaaggttctccaactagtgtatttaaatcatttacaaaatcagttaaaccagctggtacaatatacaatgaagatgcgaaaacatcagctggaattatcatagataaattaaaagagaagtatatcatataatttaaggggggataaagaatgggtaacgttttagtagtaatagaacaaagagaaaatgtaattcaaactgtttctttagaattactaggaaaggctacagaaatagcaaaagattatgatacaaaagtttctgcattacttttaggtagtaaggtagaaggtttaatagatacattagcacactatggtgcagatgaggtaatagtagtagatgatgaagctttagcagtgtatacaactgaaccatatacaaaagcagcttatgaagcaataaaagcagctgaccctatagttgtattatttggtgcaacttcaataggtagagatttagcgcctagagtttctgctagaatacatacaggtcttactgctgactgtacaggtcttgcagtagctgaagatacaaaattattattaatgacaagacctgcctttggtggaaatataatggcaacaatagtttgtaaagatttcagacctcaaatgtctacagttagaccaggggttatgaagaaaaatgaacctgatgaaactaaagaagctgtaattaaccgtttcaaggtagaatttaatgatgctgataaattagttcaagttgtacaagtaataaaagaagctaaaaaacaagttaaaatagaagatgctaagatattagtttctgctggacgtggaatgggtggaaaagaaaacttagacatactttatgaattagctgaaattataggtggagaagtttctggttctcgtgccactatagatgcaggttggttagataaagcaagacaagttggtcaaactggtaaaactgtaagaccagacctttatatagcatgtggtatatctggagcaatacaacatatagctggtatggaagatgctgagtttatagttgctataaataaaaatccagaagctccaatatttaaatatgctgatgttggtatagttggagatgttcataaagtgcttccagaacttatcagtcagttaagtgttgcaaaagaaaaaggtgaagttttagctaactaatttcttggggagggtattatgagtacaagtgatgttaaagtttatgagaatgtagctgttgaagtagatggaaatatatgtacagtgaaaatgaatagacctaaagcccttaatgcaataaattcaaagactttagaagaactttatgaagtatttgtagatattaataatgatgaaactattgatgttgtaatattgacaggggaaggaaaggcatttgtagctggagcagatattgcatacatgaaagatttagatgctgtagctgctaaagattttagtatcttaggagcaaaagcttttggagaaatagaaaatagtaaaaaagtagtgatagctgctgtaaacggatttgctttaggtggaggatgtgaacttgcaatggcatgtgatataagaattgcatctgctaaagctaaatttggtcagccagaagtaactcttggaataactccaggatatggaggaactcaaagacttacaagattggttggaatggcaaaagcaaaagaattaatctttacaggtcaagttataaaagctgatgaagctgaaaaaatagggctagtaaatagagtcgttgagccagacattttaatagaagaagttgagaaattagctaagataatagctaaaaatgctcagcttgcagttagatactctaaagaagcaatacaacttggtgctcaaactgatataaatactggaatagatatagaatctaatttatttggtctttgtttttcaactaaagaccaaaaagaaggaatgtcagctttcgttgaaaagagagaagctaactttataaaagggtaaaaatctaattaaaaatatatttgctgttaactagattaaatagtattttaatctagttaacagaatataaatactaaaataacaggaggttataactatgaaattagctgtaataggtagtggaactatgggaagtggtattgtacaaacttttgcaagttgtggacatgatgtatgtttaaagagtagaactcaaggtgctatagataaatgtttagctttattagataaaaatttaactaagttagttactaagggaaaaatggatgaagctacaaaagcagaaatattaagtcatgttagttcaactactaattatgaagatttaaaagatatggatttaataatagaagcatctgtagaagacatgaatataaagaaagatgttttcaagttactagatgaattatgtaaagaagatactatcttggcaacaaatacttcatcattatctataacagaaatagcttcttctactaagagaccagataaagttataggaatgcatttctttaatccagttcctatgatgaaattagttgaagttataagtggtcagttaacatcaaaagttacttttgatacagtatttgaattatctaagagtatcaataaagtaccagtagatgtatctgaatctcctggatttgtagtaaatagaatacttatacctatgataaatgaagctgttggtatatatgcagatggtgttgcaagtaaagaagaaatagatgaagctatgaaattaggagcaaaccatccaatgggaccactagcattaggtgatttaatcggattagatgttgttttagctataatgaacgttttatatactgaatttggagatactaaatatagacctcatccacttttagctaaaatggttagagctaatcaattaggaagaaaaactaagataggattctatgattataataaataagaatttgggaattaaaagtttaaataaaattgtttaaaaaacaatttcggatatatgaaaaatctaatttaatgggggtaatgaatatgagagaagtagtaattgccagtgcagctagaacagcagtaggaagttttggaggagcatttaaatcagtttcagcggtagagttaggggtaacagcagctaaagaagctataaaaagagctaacataactccagatatgatagatgaatctcttttagggggagtacttacagcaggtcttggacaaaatatagcaagacaaatagcattaggagcaggaataccagtagaaaaaccagctatgactataaatatagtttgtggttctggattaagatctgtttcaatggcatctcaacttatagcattaggtgatgctgatataatgttagttggtggagctgaaaatatgagtatgtctccttatttagtaccaagtgcgagatatggtgcaagaatgggtgatgctgcttttgttgattcaatgataaaagatggattatcagacatatttaataactatcacatgggtattactgctgaaaacatagcagagcaatggaatataactagagaagaacaagatgaattagctcttgcaagtcaaaataaagctgaaaaagctcaagctgaaggaaaatttgatgaagaaatagttcctgttgttataaaaggaagaaaaggtgacactgtagtagataaagatgaatatattaagcctggcactacaatggaaaaacttgctaagttaagacctgcatttaaaaaagatggaacagttactgctggtaatgcatcaggaataaatgatggtgctgctatgctagtagtaatggctaaagaaaaagctgaagaactaggaatagagcctcttgcaactatagtttcttatggaacagctggtgttgaccctaaaataatgggatatggaccagttccagcaactaaaaaagctttagaagctgctaatatgactattgaagatatagatttagttgaagctaatgaggcatttgctgcccaatctgtagctgtaataagagacttaaatatagatatgaataaagttaatgttaatggtggagcaatagctataggacatccaataggatgctcaggagcaagaatacttactacacttttatatgaaatgaagagaagagatgctaaaactggtcttgctacactttgtataggtggtggaatgggaactactttaatagttaagagatagttttagattataatatttacaaattaaatatttaattatgaatttaacctgtatgaataactatttgttattcttacaggtttttatagttaaaaataattattatctattaaacaaaaatagtgtaaaatatataatatcatgattttgaagatataaaaagcaggaagatataaaagaaagtaggtaaaagtttgtttaaaaaagagaatcaaagatataatcttatatcgtatacaaatgaagaagaaatgactttaaaagaagttttattggacaagctaaatttctcagttaggtcattatcaaaaatgaagaaggaaaagagtgttttagtaaatggagtatataaaaaaccaagtttaaaggtgtatagtggtgatttaatagaagtaaaaatagacgaggaaaaagcaaattttgaacctcaagatttaaatttacagataatttatgatgattttgatataattatggtgaataaacctccatttatggtagttcacccaacaaaaagccactatgataaaacaatagcaaatggtattagttactatatagataatcaaaaagaaaacgtaaaaataagatttgtaaataggttagatatgaatacttcagggttagttatagtagcaaaaaatgcttatgcacatcatactttatctacagcaatgagtgaaaataaagttgaaaaaaagtatataacagtagttgatggaattataaaagaaaatgagggaactatagatgagccaatttatagacctacagaagattcaataaagaggataatagatgaaagaggacagtcatctgttactcactataaagtaatagaaagactagaaaatgcaactgtattagaagtaagcttagaaactggtagaacacatcaaataagagtacatatggctcatataggtcatggaataataggtgatgagttgtatggttatgtagatgaagagctaataaataggcaagcacttcatgcatacaagctagagtttgaacaaccaagaacaaaagaaaaattgaaatttaaagcagatataccagaggatatgaaagagttaatatcgaaattaagataatggggtgatatatatgataatacataaatttataatacatgttttggacaaaaatagtgatgttccaatattaaatgactttgaaggcaaagttaatcaagaagtagatggttttttccagaaagctataaaaagaattgcaaaagatgaggatttaagaaaaggtgtttttaaagattataatgacaatttaattaaaaactgttgtgaacaaataatatatgatgaaagtacttttttgaaaaattctaaagaaattgcatcttacttgtttgacgttatgaaaattaatgctgcactagaatcttgtgatttggcaatttgcttatacactattaaagatgaaaagagtgtagcaatactgaaattagattataaaaagttgtacactcattcaattgaatttgtggatgataaatttaatattcaaatggtttcaaatgaaattggtatcccagagactttaagacaaaagcaaggagctttgattagtttaagtggtataaatgatgagtttcatctaaggcttttagataaggatgctgaaaaagaagggtcagaatctaagtttgtaacagaatttttaaatgctaaaaaaatagatgatgataagtacaagaccaaggtatttaaaaatacagctgaaaattggataactaatgctcttagtaatgatataaagcaagctgaagatgtaagaagtatattaaattatacactgaaggaaaaacatgaagttgatataaatgactttgttgataattcaattaaagatgatgagttaaaggatagctttaaagagcatatggaagaaaaaggtcttgatgaaagttttagtatagataaaaaatgggttgagaaaaagcttaaaaaaagaagtataaaaacggataatggttttgacataaaagggaatctaactgattttgaagacccaatgaagtatactgtaaagcaaaatcaagatggaactatagatataataataaagaatgttacattttatgaagaaaagtaatttatatacttagtatataaattaaatataagagcgtgtattttatatattgtaaataaatgtaatctagtctgtgcgaactctaatataatttattatgtagaagtttacacagactatttatatttgtagacaaaacgatactatttgttttcttcgatatatttacatatatcaccaatacatttaaagttctcagcttcctcgtctggtatttctattccaaattcatcttcaagggccattataatttcaacagcatctaatgaatcagcttctaagtcgtccattaaagatgcttccatagttatctcatctaaattgtctacccctaattgttctgctattatttcttttattttctcaaacattttaagcctcctaaagcagttttaattaattttaatgttagtttaatataatatcaagaatttttcaatatggaatctataaaaaataataaaattttataaatgtagtaataaagtattatttgatgaataaactttattgataacaaatataacttaggaggaaatgctatgaaatatgtaggactattactaacttcagtaggaatgtttttacttatagcagtaaatttttattataattcaataactttagatatgcaacgtatagaggattatgtaatggagaccaatttaatccttgaagatgtagctgaaaaggagagttatgtatctaatgaaaaagaagactacatatcaaggttaatgcatgtaaagaaaggaatagaaaattcaaaaacatccttcttgatagaaagatataaggagtacaaaataaaatcaatagaaagtttaatctacactatatcagaggagaaaaaagattatctggatgaagttgatagatacaataaacttggtgaaaaagaaataaataaactaatcaataaaaactttttagaagtaacttatctgtctattactacatatatttaattaaagagacaaaacttagtctcttaatgattcaaggaggattagttatgacaaaattagaagacaatatggaacgtttctttggaggatgcgaaggattttttggtaataaaatgttgataataatagttatagtattcttactattatgcacagacattttagaagacttattatgcgatgacaatatatggatatgggttatattaatagtattgttattatttaacttcgatgatggttgttgttgctaaaaaatattgattattaaataggtaaaaccagtaacttatacaagttatggttttaccttttttagttcaaattaaaaaatttaaaaaaatagtaaaaatacattagcaaaatggaaaccaaatgcatagtatatgttaggagcgaaaagctcaacaaaatatcaacaggaggtaacgtacaatgttagatagattctttggagaagaaggatgttttggtggaggaggatggtggataatagtactattcttcctattcttagcttttggagatagctgggcagaatttgacataatggcatggataccattcctaatagttttattaatactttgctgctgtggtggatgcttagaataagaacacagttattaaaaaaaggagggctttgttatgttagatagattttttggagaagaaggatgctttggtggaggaggatggtggataatagtactattcttcctattcttagcttttgaagattgctggagagacattgacataatgtcatggatacctttcttaatattattgctaataacttgttcatgtggtggattctttgatggtgaagtaggttgcggctgctaatacttaaatcattagaataaaaaaatgctggtattttataccagtatttttttattttattttttaatatgatttaaattaagaatgaatattattaaatttgttgaatatagggtataatataaaatataatgtatttaaatgtacttgcttttatggtaaaataaaaacttatataaatgtagttaaaataggaaccttcaaaaatttggttcagttttagataaatttagtaaaataaggaggatgaagatgaaaggcaatataacgataaaagatgttgctaaacaagcaggagtgtcaatatctactgtatctagagttataaatgattcaaaacctgtaactgatgaagtcaaacaaaaagttttagaggttataaaagagactggatatataccaaatccacttgctagaagcttagtaacaaagaagagtcaattaataggggtaatagttccagaagtttcagattcttttgttaatgaggtgttaaatgggatagaagaagttgctaaaatgtatgactatgatattcttttagcgaatacatactctgataaggaacaagaacttaagagtataaatctattgagagcaaaacaagtggaaggtatagttatgatttcatggatagttgaacaagaacatatcaactatatacaaaattgtggaataccagcgacatatataagtaaaactgctagaaattatgatatatatacagtaagtactagcaacgaagaagctacttttgatatgacagagcatcttataaagaaaggtcatgaaaagatagcttttataatgacgagtaaagatgatactgttttagaaatggaaagacttgctggttatgagaaagcactttcaaataacaatatagaattagacaagagtttgattaagtatggtggaactgattatgagagtggatacaatagtatgaaagaactattagatgatggaataatacctcatgcggcttttgtaacaggtgatgaggctgccataggtgctataaatgctatatgtgatgctggatataaggttccagaagacatatctgttgcaggatttaatgatgttaagatagctagaatgtatagacctaaacttactacagtatatcaacctctatacgatatgggagcagtagcaataagaatggttataaaattaataaataaggaattaattgaaaataagaaaatagaattaccttatagaattgttgatagagaaagtgttacagaaagaaaaaaataaaactattaaaatcaatcaggtagtgcctaaggcactacctgattttttatgtcaataatatcaaatttaataatagattaactaaaaataattatctaattacttaaatagtttatttttatctactcatgagggttagactttttagttttcttaaataaacctttagattttttttgttgaccacctggtgtattttttggtgcaggtgaatttgatttacctttagtaggtttagccttcttagttttagctggtttagtatctctttgattttctgcatctgagattttttccattatattatctagttttttgcgttgattttcatctaaaaatgctttgaattttgatactacttcatctcttccatctaagttcttacctatttttataagttcctccataagttcattttctgattttcctttgtaactatcagccatcttttctattttatccttgtcaatatttttttgtttagccattttttctaatgactctgtatctaattttttcataaaaaaacccctttctataaatatatattgaattatattcatactatttatatatagaaataatattgaagtggtgaattgtgagtgatatataatataaataaaaattcttatagataatatatatgcactgagctttaaaaatggaacattaaaatatgaaaaacatactttaatatagggcaattatataatataagggggaattgtcttgaataacttactatttttgattggagtgattgcattgagtaatggtaatatctctatatttgatgataaaaataaatcaaaaggaaataatagagttagaaaaaacaaaaaaaatgcaaatgataaactttcacagtctacacatggcaatttaaggtttgatgcaaatgatataaaaagaggtttaaggctcatggatttaagtgaagaagatttagaaatgggaatggaaataataacaagaactaaaaaatacatgtcaagagatgaaagaaaaatactaataaaaatagaaagtgttttagatttagttagaggaataaaaaaattaaataatatagatatggtagatacagaagatgaaacggattttttcagaaaaatggatagtgatgataaaaagaatatgatgataaaggaaattatagatgtattcccagaaaaaagaaaaaattcagttgaaaaagctataggaatgaaaaagaagatagatttatttgcagaattatttttaccagatgactttggtgaaggtggatttagtttgagctctttggcaaatataaacaatcttggtagtatgaataatctcaaattgttaggaagtcttttaagaggtgatgatagtaataatgatgatgaagacaataatgatgagttaaattatgaagacgaagaattagattgtgaagacaaagaattggatgatgatgagttaacagatgaaggtgaaatggaggataatgaagatgaattagtagaagataagaacacaggctatgaaaatatagaaaatgatgaagatatagtatacgatgaggaactatacaacattaatgagcaagaatccgaatacaattataatgaaaaaaatactaaaactagagctaagaaaaaacgataattaactaaatacataaagaaaaaaggaagaaaaagtaatgatagaataagattatctcaattactatataaaaccactttaaaaaattcaaaatttattatataataataatatgaaatcctgaaacatacgataaggcttttttaaattcaacctacaaatgaaatacgggagaccgtgtctggtaaattataacatgcctagttagtttggacgttaaaggttactggcaagtcacccacctgggagtgcctagggtgtgaatttacttagccaccggtgtttcgggacaaaaaaagtgctactatttcaaatagtagtactttttttattaatatgcatttttctactaaatacgcctaattattgataaattcaaaaagcaagtaacaattaagattataaaagcatagtattaattaggcttcaaaaagccaaagacttaataagaatcgcttacagggagggcaatgaaaaatgcaagattataaaaaaaataaaagaagaatgatgaatcagccaatgtctacaatgaatgaagaagaagtgtatacagatgaaataaattcagaagacatgagagggtttaaaaaatcacaccatcataatggatgtaatactgataataagtgtgagtgccatgatgagtgtaatccatgtaacccatgtaatccatgtaaacctaacccatgcaatccatgcaaacctaatccatgtgatgacaaatgtgaatgccatgacaagtgtaaatgtgattgtgaaccatgtgaaatggattcagatgaatgttttgaaaacaaatgtggaccagaatgttgtaatccgatatctccaagaaacttctctgtatcaaatgcagtgccatttgcaatagaggctaatagaatatttgatactatgcaattccaaacatttacagatgcaacaggtccaaatggagaaccattaacttttgaaacagaagtagtagaagtatttggttcaattccaagtgcaggtcaagcaagtgtaactatagaaaaaatatgcttaagtaatgatggaatagttatagacacaggaatgacaactttagaagatttcgatttagacccattaggagatatagtaggaagaaactgtgaaacaacttttgaatttgcagtttgtggagaaagaaacgctgagtgctgtagacaaggaaaaggcaaatcagtagcttataaacaaagaggattaactgtagcagttcgtaatttagtactagagctaagaggtagatgtggatgtacagagttcgttgcattagctttcccagcagttagagcaggaggtggatgtaagagaagagttgattatgtagaatttacttttaacacactttcagcaccaatatgcttgccagctgacggaagagctgttactttaagacaagaatatcaaactaacttaactgtagattgtataggaaaatctatattaaaattagaatgcaacgaatgttgtgaacctttctatgaattaattataccaaatgatatagatttagtactttgcttacaagaaacagttagcacattaataagtgaacaaatagtagttttagcatcaccaaatccaatccaaccaagacttgttgatactttctctaaagtatgtgatttttcgcaatgtggacctaatcatggaagtggaaagccaagttgccacagatagataggtaagatatatagacagtttaaattataaataaaaatcatctaaggaaggctaccaaagtgtataatttacattggtagccttcacgtttttataactagcgtatagattttagtgatttaaaaagcactatagtatgtaatagacaagtaaagattgatactatcgtcattgtgtatatgtatgcataaatattaagtcctggaattggaagaaatacatataaagctattagttgaattaacatgccagtaatagtatttatacttgaagctaattcttttcttattgaatgtaaaatgccagatagagtttgatttagggacataaatagtggaactaaaaacatagcttttagatattctcctgcaagtgtatttttaaatactaatatacataaatcttttccaaagaaataaaaaaatattgatgatagtatgcctacaaataaagtaagaagtatggagtatttgatttttttaattacactcttacgctttcttagagccatttcctgtgaaatagttggtattaaatttacaataagcgctgaaccaacagtaaaaggtaaaaatataaagggcattaccatcccactgacaataccatacatacttaaagattgttgataagtcattcctgataatgctaatcttgatggtatcatcatagaacttatagattgcaaaagtatgtttgacattctattacaagttatgggaatagacatttttaatgtttccatagaagaattataaaaatcttttatgcttataatatacctattgtcaaatgatgaatctcgccataagcaaataagcataaatataatattgctcaactcaccaatagatatacctaatagagctatataacaattcatagatttattatttatgtacataacaagtaaaaaaacaaataatattttaccaatttgttcaatgatttgtccaatagcagggatttttacattctttatgccatagtaatatcctcttagtacgtttgaaagagttattataactatagcaggacaaacagctagtataaatagatttaatttagcatcttttaaaaatttaagtgataaaaaagaactattgaaagatgcaactatagatataattagtgctacgaaaaatgatatatataaagttgatataaatagagcattagtattgtgtctatcgtttaaagcttttctctttgcaactagacaactaagtgcagtaggtatacctgttgttgtaacagctaagcaaatcatcaaaaagttaaaaatcatatgatagatacctaaacctgtttcacctagtgctcttgataagaatattttatataaaaaaccaaatattcttacaataaaattggatataaataaaataactgttgatagtactaaataaggtactttcaaaaaaatcacctccttatcttttaaatatattcacaaggaggtgtaaaaatttataattttataaattctggtttcaatttattaaatttagatacatatttaaatcccatattttttagtaatgaatatatgtagtcaaactcacatgcaacttgacttatatgatgtgaatctgaacctgtggttatgatttcccctcccaagtctttgtacatttgaagtatatacttagatggggttaggtctggaagattatatctataacaagaggtatttatctcgatacctttgccatcataaatagcttgtttaagagtttcttcaattatatcagaaaatagtctatcatctaaaatagtgtcataaggtgcataccttttaatcaaatctaaatgacctaagacagagtaatctttataattcttaacaatattatataaataaagatagtaattttcataaacttcatattgagttttatctttaaaataattaccaaggtataagtccattgtatctatagcatggatagaacatattataaagtccaatggatattgatgtgcttcctttttgtatgtatccattaattgagtttgaactccaaattcaattcctttttttattgatattttatctttgtatttgctttgaagagtctctaaactcttaaaataatcttcgtagacaattgaaaaagaatcatcagcatatacatcatagtcaacatggtctgtgaaacaaatttcctccaaaccgagttcaatagatttttttaccatttcttccattgtagattttccgtctgtagagaaacttgagtgcatgtgatagtcgtaaaacataaatatttcccctttttataaaaattttggtattatatatacatactaaataatatcaaatatatataaaagcatcaataaaatataaatacaatgagcggtgataaatttggaaaaatacagaatagatttaaatgagaaaaaatcaactaaatatatacagatatttaatcatataaaagaattgataataaataaagagttagtagaacatgaaaaattgcctccaataagaaaactatcaaattttttacaagtaaataacactactatagttaaggtatacgagcttttagaaaatgaaggatatgtatataaaattatagggagtggtacttttgtatcaagttcaaattcttataaaagcggtatagataacaggaaaaataagattattgtgcaaagagaagatttaattcattttgacaatgggaatccatctaatgatatgtttcctatcgattcatttaaaaatgctgtaaatatggcattatctaaagatggtagttcaatatttgaatatgatgaaggtcttggctctgaagaattaagagaaaaaatggtagagtatctaagtgatggaaatataaaaactactaaggaaaatattcaaataatatcaggtgctcaacaaggtatagatatagtttgtaaaggacttataagttattcagatgttgtttttatggaagaaccttcttacaatggagcaattgaagtgtttaaaagtagaggtgcaaaaataatatctatacctatgttagatgatggaattgatataggtattttaaaattaaagttggaaaaaataaaaccaagacttatatacattatgcctaattttcaaaatccaactggaatatcttactcaacatataaaaaaaagaaattgatagaattggcagaagaacatgatttttatataatagaagatgattttataagtgattttgtttttgaatcaaaggacaatagaacaattagaagttatgatgataaaaatagagtagtatatataaaaagcttttcaaaaatacttatgccaggtcttaggataggaattgtagaaatgccaaatgagttgttaaaaaaagttttatgggctaaatattcatcagatatatcaacaccaggtttaattcaaaaatcaatgtattactatatgaataattttgattggaagaattatttgagtcatatagagaagatatatactaataagtataaattgtcaaaaaacttgattaatgacaaattgagtggtaaattaaaagttagaaaatcttgtggaggaataaacttttttttagaattaccaagaggatatacatctcaagcatttacaaattttatgttaaacaaaggagtgtcaatgcttccaggaacttatttttttgacaatctagtggatgatagattctttaggataaatatagctcgcccaagcatggaagaactagaaaagggaatatctgtaataagtgataatatagatgagtttttttgtgaatataaaaacaagttagatataaaaagcaataaattattttattaaataaatagaggttttttaggaggaaaaaatgtttgacaagaagaaattagataggattaatgaattagcaaagaaaaataaagagggaatcctttctgctgatgaaatcaaagaaagagaaattttaaggaaagaatatttagaaaactttagagctcactttagatcaagactagatagtgtcaaagtagtttcaccagaagaatatgagcaatacatgaaaaacaataaaaattagaacttagtaggaggaaaatatgaacttaaagtacgaatttaagaatgcttgggattttgaaagaaaagaaaatactattgaacaaattatgcaatattctcgcaattatatggagtttttaagtaagtcaaagactgaaagactttcagtaaaagaaattataaaattggctaaagaaaataactatatttcaatagatgaagctatggaaaaaggaagcataagttgtggtgataagatttatgttataaataaagagaaggcagtagcactttttgtaataggtaaaaattatatagaaaaaggtatgaagattataggaagccatatagattcaccaagattagatttaaaaccaaatccactgtatcaagagagtaatctaggtttttttaagactcattattatggtggaataaaaaaataccagtggacagctcttccacttgctttacatggtatagttatattaaatgatggaacaaaagtggacatatctattggggaagaagatagtgacccagtattttgtgtaactgatttattgattcatttggctggagaccaaatgcaaaagaaactatcagaaggaattagtggagaagctttaaatatattaattgggaatattcctttagaagatgaagaaaaagaacctataacagcaaatatattaaagattttaaatgagaaatacaatatagttgaagaagacttattaagtgctgaaattgaagtagttccagctggtaaggctagagatttagggtttgataggtctatggtgttgggatatgggcatgatgatagggtatgttcatatgctgctgtaaaagctatactagaaactgaacaaccagaatttacttcagttgcattatgtgtagataaagaagaaattggttctaaagggaatacaggtatgcactcaaagttttttgaaaatactgtggctgaactgattgctttagaaggagattattgtgatattaaagtaagaagagctttagcaaatagtaaggtattatcagctgatgtttctgctggatatgacccaaattttggagaagcatatgaaaagagaaattcagcatatatgggaaatggagtagttttaactaagtatacaggttcaagaggaaagagtggatgtaatgatgctaatgctgaatttatgtcagaagtaaagagaatttttaataaaggaaatgtagtatggcaaactgctgaacttggaaaagtagaccaaggaggaggcggaactatagcccatatattggcaaatcaaggtgcagaggttatagactgtggtgttggagttttaaatatgcatgcaccacatgagattgtctctaaagtagacatatatgaaatgtataagggatataaggcattttttaatataaatttataagtaaaaatataaatgtaataagtgaataaaggctgttgtataaacaatttaatctgttgtacaacagtcttatttttatgtaaaaatagcaatttgtcacactagagaaaataaaagaaaatactgtcaaattaaaaattatttaaaaaaaaattgacaacgatttcatcttgttataatatgtaataaagaacttgttatataatgttataaaaatgttacatagggaggtgagcaaaatggatgaaaagagacaaaaaaaagaaatggatttagaagtaaattcctttgttcctttatatcaacaactatatgacaacataaaaaaacaaatagcatctggcatatataaaccaggagataaacttccatctgaaggagacttatgtaaagaatttaatataagtcgtataactgtgagaaatgcacttaatgaacttgtaaaagaagatatattatgtaaaaaacgtggtaaagggacttatgtaacaataccagagagaatagaagcaacatgtgcaggaaatagttttactaattcttgtcatcgtattaatgcaaaaccaagtaccaaaataatctctgttttaataaaaaaagcagataagcaagtagctgaagctttaagtattgaactagaagagaaggtaatatgtattaaaagacttagattaatagatgaagtacctgttatttttgaagttgactattttagaatagattacatgtttttattaaaagaagaattagaagataaatctttaatggaggttatatctaataatataagcacattacctaaacgagtagaaaatatatttgaagtaaaacattcaaacaaagaatattctgactatcttaaatgtgcaagtaatatgccactattgaaagtaagacaatcggtgtatacagaaaataatgatgtcttatattacaatgagcaatttataagaagtgataagtacaaatatgcagtatcagcagaaatataatctatatttagtaggaggatgaagtatgaaaaagataatattagcatctcatggagatttttcaaaagggcttttaaatgcagtaaaaatgatagtaggagatttagcagattgtgttagttcgtatggtttgtaccctggacaaagtgcttcagattttgctttagaattagaaaaaacaatatcagaagatatagaatgtgaatatataattttatctgacttatatggagcaagtgtatgtacagcaatgttaagattaactaatctacataatgttaagttattttctggaatgaatttgaatatggtattagaacttcttacaaggttttctgatgaattaacagttgaagatatagaacaattagtggaagaatctagaagaggaatacaaagcgtgacattacaaattaaagaagaagaagaggtattttagtttatgaaaaaaaagggaatattatcagtatttaaaagtaaaaaaccaattatagcaatgatacacttaaaaggagatactccagaagatatctttgaaagagctaaaaaagagattacaatctttgaagaaaatggtgtagatggaataatgttagaaaattactatggtaattattatgatttagaaagaatacttgaatatgtatcaaaagctaatttgtcaataccatatggagtaaattgtttaaatgttgatactatgggatttgaactggcaacaaaatataatgctagttatatacaggttgattctgtagtaggtcatgttaaacctagagacgaagctactttagaagaattttttaaattacaacgttcaaaatgcccagcgtatttaattggaggcgtacgttttaaatatcagccagtattatcagaaaatgacgttgaagaagatttaaaaataggaatgacaagatgtgatgctatagcagttacagaaaatgctacaggtcaagaaacatcaatggaaaaaatagaactgtttcgtaaaaatttaggagactttccattggttatagctgctggagttacattagaaaatgcaaaaaaacagcttgaattaggagatatggcaataataggaagttactttaaagataattacaaagattttgggaatgttagtgtagaacacgtaaaaacattcatggatgaaatcaaaaaaattagggaggaattataatgattaaattagtaagagtagaccacagacttatacatggacaagtagcatttacatggacaaagtttttaagcacagactgtatattgatagcaagtgatgaattattaaaagatgaattaagaatggcagggcttaaaatggctaaaccatctaatgttaagttagtaatgaaaagcatagcagattctataaaagcacttaactcaggtgttactgataaatataacttattgatactttgtgaatctgtagaagatgtttatagacttgctaaagaggtaaaagctattaaatctataaaccttggtggaacaaaatcagatgataatcgtgaaaatatatctaaagcagtgcatgtatcaaaagatgatataaagatgattaaagagttagattcagaaggcgtaaatgtatttgtacaattagttcctgatgatgatgctacaaatgtaatgaaattaatataattttagggggatgaaaatggaatttacacaagttattttgataactctaattgcattctttgcatatatgcatagttttgtaggttctacaatgcataatagacctatagttgttgcaccacttgttggtttagcactaggtaatcttcatacaggtatagtaataggttcaacattagaattagtatttatgggtgcatttcctgttggggcaagtaatcctcctgattttgtgtctggttctattattgccacagcgtttgtaatattaacgggtcaagatgtatcagcagcagttgtacttgcagttcctatagcaactctagtattgcttatagataacttcttaatgacagtagtacttacatggggagctcatattgctgaccgttatgcagaagaggggaatattgaaggcgtagaacgtgtgcaattattatttggtataggaaataaattaatattagcaataatagtaggtataggattttcattaggtgttccagtaatagaaaaaatactttcatttataccatcatatgtaactcatggaatggatgttgcagcaggcgtgattccagcaataggttttgccatgttagctaggatgatgcttaataagaaaacagtagcatttttattattaggatttatattggttgcttacctaaacataacagtaacaggagttgcattgtttggattagcaatagctttaatatatgttaactttgtaggagagaaggaggtaatagtagatgacaacgagttctaagaagttagatacaatttcacccgatagtaaaataacgaggaaagacttttggaaatgctttagaaggtcattgacattagattcatcttggaactacgaacgtatgcaaaatatagcatatgcatacatgatggcaccaataatccgtagattgtataaagatgataaggaaaagaaatctaaggctttaaaaagacatttagaatttatgtcagttactcctcatataagtactcttttggtaggtatatctggagctatggaagaagaaaatgcaaagaataaagaatttgatgctaatagtataaatgctgttaaatcaagtttaatgggtccagtttctgggataggagattcatttttctggggaacattaaagcttatagcagctggagttggtatagctttagcttctcagggtaacataatgggaccgattttattccttttaataataaatgttcctcattttattatacgctatatatgtctagataaaggatttaagtatggaactcaattctttaaagatgtgagtagttcaagtatagtttcaaaagttatggaagcagcttcaatgttagggcttatggtaattggaggtatgactgcatctaatgtaatgttaaaacttagtgttaatgtaggtagtggagaatgggcagagcctattcaaacttacttagaccaaataatgccatgtatgcttccagctatgatattcggtattatgtattggttattaggaaaaaaggtaaagacaactacgatattaatttcagttatgattatttgtatagtattagctgctattggaatagtataaataaaaaaatcccaagttcatttgaacgagggattttttgactaaattaaataaaaaagaaagatggttcataataatttataagcatttatgtgatagttataattagcttattaattagttataaacccaaaattaagcactactttattaaagttattatattataatttcgaaatactcacataatctgtttagaaatttatcttctaatggggaaaaagttttctttttagagtaaataaagaaaaattttctagtaaaatcaacaccctttattttataacattttattttacctgcattgagataatcaatagctgaaatgtacgatataaaggagactccaagacctaatctaaccatttccttaatagcctcatttgattctacatgagctattacatttaatttacttactggaaagttatttttactaagtgtgtttagtattaagtttcttgtacctgacccttcttttctcataataaaatttagataagccaattctcctatatcgatacaattatttttattatcaattttaaaatctgaaggagtgataagaacaagttcatcatctaataagtctaggtactctatttgaggattattgattttagaaccaactaatccaaagcttattcgttcatttaaaatttctgatatagcatattgagaatcataatggcttatggaaaattttacatctggataactcatagaaaaactcttcataaaatcaggtaaaatataagtttcaggtatggaactacatgctatatctataataccttctatttttcctgaatattcttttatatcataaattgcacgtttgcaattattcaatatatatatagcatgttcataaagaatttcaccagattttgtgagtgtaataactttgttgcttctatttataagaacagtttccaactctctctctaaattctgtatgtgtgcacttacagtaggttgagttaaaaaaagttctcttgcggcctttgaaaaactctgatgttttgcaacagcaacaaatacttcaagttgtttaaaatccattatttaatcctccttaaattatctaaaactattataacatatttgataaattaatagtcaaaggtgatttttaaaatagaaaacctttaaatattcatggagtttttgattgtttaggaataatttggtataatattgtaaggtacttacaataaaaatatcgtaaattgaattttcaaaattcaactttaaagtgttttttattacagaaaaattacaattagcttcttaatcttattaaattcaaataaatattatataattattttataatataataaatataattattgaaaaaagagataactgtaaattgagatatagataaatactataaaatttaagaaaggaggattgatttatgaagttaaaaaggtcattagtttgtgtaactattttaggtattatacttgttggatgtcataaagaaaatactaaagagaaaaatcaagtagcaagtaaagcaacacagcaaaaaactatgacaaaagttcaaaatgatgttaatgaaattatgaataaagattataagtacattataaagaatatgggtataccttataatacattttattatataaaacctaaagttttaaaagaatcgaatacaatgcaagatataaatacatcaagttatatgacattagtttatccaaaatatactggaaatgatgaactagatggaagtgctttatatgttgatattaacgaaaataaagttgtcaatgttgaaaccaattctttctcatcacaaggtatatcagtcattgatgctgaatctagtgttgtgattgaaaaaagtgaccatgaaaaatcggctgtatcactagaaaattttagacgtattgacctgggagagtatgttggtgttgaagagtctagaataaatgaaattgtaggagatgcgaattatgatttaacagcatataatcatgaaggtagtaaagtagttaagagttatagattgaaagaagataacaaaatattaaaaaaagaggtacttacaataagtattgtggataacaaaataaaatctataaaaactattgaaagtgataaaattgtaaaaataataaaaggaactttattagaataaaatattctaaagcatatgatgctgtttcaagatagaaggaaatttctagctgggaacagtttttttattagatttataaaatttgaactgcacttatagataactattagttataattaaatataagataaaagtatttccaacttttataatctataatatattacatagaaatatcttaaataaaaaatatattggggagtatttaaaatgatagaattagaagatgccataaaaattattgaaaaaaatgttttaccaataaacagggtcaagatagtaaatcttatagatgcagtaaataaagtagttgcagaagatatatattcaacaattgatagtcctccatttgataggtcaccctatgatggttatgcatataatgcaaattctgaaaatagaaatttaaaggttatagggactttgtatgcaggagaagtatttaataaggtattaaataaaaatgaagcagtgaagataatgactggtggaaagataccacagggtgcaaactgtgtaataaaaaaagaagatgtaacggttataggtgatatgataattttaaatgtaaaattaaaggaatacgataattacatatttaagggtgaggatataaaaaaggggcaattgattattaataaaaatcagaatataggatatgatggtattggagtattagcaagtcttggaatatccaaagtaactgtttatgatgatttaaaagttggaattttgaatacaggtacagaactacaagatataaatgagactttagagaatggtaaaatatacgatagtaatagatataccttatattcaagattattaaaacttggaatacaggcagatacaatatgcaattgttctgatgatatattggagttagaaaaaaaggtaaagaatatgttacagagtgtagattttttaattacaacaggtggtgtttctgttggagataaagatttaattccagatgtattcaaaaaaataggggcaacagaattattttggaagataaacattaaacctggtggagcttgttatgtaggtatattgggagaaaagctattatttggtctttctggtaatccacatgcagcaatagtggtatttgataatgtgatagttcctgttattgagtatttaacatataagaagggaatacatcatataaaagctatatttaaaggagaatttaataaactttcaaataaagatagatttgtaagtggaaaactatatacaagtgaaggtaaattgtatgtagagctaaatgataagaaagatgcaaaagctagattatctgcaactctaagaagtaattgtatgattaagattaaaaagaatgagacaataaaagaaaatcaattagtggagattgttattagatagttttatgaaaggacacaattttatgtataatatattgtcagttgtctcatattcaggagtaggtaaaactacgttgattgaaggcataataaaagaattaaataaaaaagggtatcgtgttggagttattaaacatacctgccatgattttgatatggatgaggaaggaaaagatacttataaacatagaaaatctggggcgagaaaagtctgtataatatcagataaacgagtagcatatattgaagaactaaaagagaagaatccattatataaaatgattcaattatatgaagatatggacttgattatcatagaaggatataaaaattatagatttaaaagattggaagtaactagaaaaggtaagtatgaggatattttatctaataagtctgatttgataggtattgtcagtgatatagaatataaattgaatattgaacagtttaatttaaatgattataaaaatatatcaaagtacatagagtcttgtataaaaaatgaaattttaagtataagcaatgttgaaataaaaaacatattaaaagaataattttaagatgttcttcttatataaaatgatataattatttatataaataaagatataagaaatttatcaattttattttgagttataaaatattaaagaaattgtaggaggacaatatatgaaaaaaatattagtagcatgtggagcaggaatcgcaacatcaacaatagtttgtgacagagtagaaagattggttaaagaaaataatatacacgcagaagttgagcaatgtaaaattgctgaatgttcaacaaaacaagaaggtgctgatttaatcgtatctactactatactaccaacaacttatgatatacctacaataaaggcaacaggatatataacaggtataaatacaacagcattagataaaaagatattaaatgcattgaagtagttttgtgtttataaaaaaaatttagtattaaatatagagttgtatctttataaaattttaaatatagagatatagctctttttatgctgtttcaagtatacaactatatgatataaatcttcaattttatgaaaaagattgttattactttgtaagtttataaaagatttaaagttattgttatgttatactaatttatgggtattttttagaagtactatatagaagtactaataaaggagggatttaatacttatgataaaacaatttgtcaaatattataagccatataagaaaatttttacactagaccttatagcagcttttctattttccttatgtgatttagtttatcctatgataactagaaatataatggatgacgttgttccaaataaaaacttaagaatgttagtagtttttgcagtagcacttatacttatatttatagcaaaagcagggcttaactattttatgcagtattggggacatgttattggtgtagatatgcaagctgatatgagaaatgaggtatttacacacttacaaagacttccaaatacgtattttgataataacaaatctggagtaactatgtctagaatagtaaatgatttaatggatataacagaacttgcacatcatggtcctgaagatttattcatttctatagtaatgttggttggttcattctttatacttatagatataaatattcctcttacgcttataatatttgctatattaccgtttataatttggtttgcaatagctaaaaaagataagatgaatattgcttttatgaagagtagagttactataggtgatgtaaatgctactttagaaaatagtatagcaggtatgaaagtaactaagtctttttgtactgagaaagaagagttaaataagtttgtaagaagcaataaattatttagaagagcaagacaagattcttataaggtaatggcagaatattactctggtatgaatttatacatggatatcttagagtgggtagttgtaatagctggtggttattttacttatataggaaaaattactttgggtgattttgctgcttatatactatatgtaaaaatgtttatacaacctatgaaaaaattaataaattttacagagcaatatcaaaatggtatgacaggttttaaaagattcatagagataatggaacaagaccatcaaaaagaagctaaaaatcctattgaacttgaaaatgtaaaaggtgacattgagatagaaaatatatctttcacatatgaagataagactcaagttttggataatttaagtttatctataaaagctggtaagactatagcattagttggaccttctggaggaggaaagactacattatgtaatctattgccaagattttatgaatttgataagggtgatataaaaattgatggaaagagtataaaagatgttagtttaaaatcattgagaaaaaatataggtatagttcaacaagatgtatttttatttacaggaactataagagataatattctttgtgggaaccctaatgctacagatgaagaaatgatagctgctgctaaaaaagctagaatacatgactttgtagagactttgccagatggatatgatacttatataggagaaagaggcgtaaaattatcaggtgggcaaaaacaaagaatttcaatttcaagaatctttttaaagaatcctccaataataatattggatgaggctacatctgctttagacaatgtaacagaaagagaaattcaagagtctttagaggaattaagtaaagatagaacaaatttagttgttgcacatagattgactactataaaaaatgctgatgaaatcatagtattgacggataaaggaattgaagaaagaggtactcatgaagagttagtaaacaaaaatggagtatatagtaggttacacaataactagtatacaaattttacaccatagctaacatacgcattaaacttacaaacataggatatattaagattcataaagacaattcattttatatttatgagatgttttatgaataaaatgtatcctatgttttattttttgcaaattacatttaattctctttgtaagaatagagttaaatagccaatggtcaggataacgtttttacaaaaagaataatttagaaaactaactttaatttatggaatttatcgaattttatgaaaaaaatcgaattttgacttgaaatgtttttcaaaagtagtaaaataatggataactatacatacattttataaaaatacatttattatgaggggggattttgtatggaggcaataacagctttttgtctagttttaatatcactgacgataggagatatagtttcagcaaaaactaaagcttttgttccgtcggtttttgtatcagcaattatatttatagtaggattctggacttttttcccagaaaatattgtggacttagccgctttaggaacaccattagctcaattaggtatgcttttgttaataactcatatgggaactatgatgagtattaaggaattagcaggtcaatggaaaacaatagtaatagccttggcaggaatagtaggaatatgtgtaggtgctttggcattagggacaatagtatttggatgggatacagcagtaatagctacacctcctcttactggagggctagttgcatctataatgatggcagatgctgctacagcaaaaggtcttgcaagtttatcagtacttgcaattttgatgtatgttgcacaaggatttgcgggttatcctattacagcattaatgcttaaaaaagaaggaaaaagacttttatcagactttagaagtggaaaagtaactgtaaatacagatgaagaaaaagttaaggatttacctgaacaaaaaagcagatttaagataattccagacttaccagaaaaatatgatacgacatatatgataatacttagattaggatttgtagcatggttagcagtacaatttacaaatcttacaaatgaagttgtatcaagatatgttatatgtttaatatttggtgtaatagcatcagaacttggaatagttgatagaaaaccacttaataaatctggttcatttggatggttaatgacatcattgatggcttttatatttgcaggattagcaaaagctacaccagcaatgcttgttgaaatggcagttcctcttgtaggaatcataatatttggtgtaataggtatgggaatattctctattatagtaggtaagcttttaggtgaaagtaaagaaatggctttttcagtttcgcttacatcactttatggttttccaccaaactatatattaactgaagaggcagtaaaggctttggctgaaacaccagaagaaaaagaatttttaatggataagatgcttccaaagatgcttgttggaggatttactacagttacaatagcttctgtagtaatagcaggtatctttgtaaatctaatatagtatttaagtgataaaaagtattttaaataagaagaatgtgtactacttggaggtatggaatggatattaaagaaataacaaagagttataaagactatgtaattaagcttagaagggaatttcatgaaaatcctgagaaaagtatggaagaagttagaacatcaaagagagttaaagaagaacttgataaaatagagataccatatgtatcagctggaggtacaggtgtaattgcaactataaaaggagctaatccaggaaagactgtagcacttaggggtgatatggatgctctacaagttgttgaatgcactgatgtagaatacaaatctaaaaatgaaggacttatgcatgcttgtggtcatgatggtcacacatcaatgcttctaggggcagcaaaagtgttaaatgatattaaggatagtatcaatggaactgtaaaattattttttcagccaggagaagaagttggtaaaggtgcaagagctatgattcaagatggtgctatggaaggtgtagatagtgtgtttggaatacatctttggactgatgtagaatctgggactatatcggtagaagaaggaccaagaatggcttctgccgatttctttaaaattactgtaaaaggtagaggtggtcatggttcacttcctcatcaaggtgttgatgcagtgcttgcaagttcagcaatagttatgaatctacaatctatggttagtagagaagtaagtcctctggaaccattagttgtgagtgttggagttttaaattctggaactagatttaacgtaattgcgagtgaagctgtcttagaaggtacaataaggctatttaatccagagcttagaaagcaaattcctggaattttagaacgtatagcaaaatctacagcagaagcatatagagcagatgctgaattagagtatgggtacttaacaccagcagttataaatgacaaagaatgttcaaagatagctacagatgcagcaattaagctatttggagaagactgtataacactatttgaaaaagtaacaggagcagaagatttagctgagtttatgaatatagcacctggtgcactagcatttgtaggagctagaaatgagtcaaaaggtgcttgctatcctcatcatcatggatgctttaatatagacgaagatgctctagaaattggaactgctttatatgtgcaatatgcagtggatttcttaaataaataattttaatatactataaagaaaaagcagagactaagtttatatctctgcttttttattgtgtatattttttataaatattgactatataaaatatatatgatagcataaagaaaatgataatcaatatcaattaaaaagaaggtgatttatttgaataatgtaatatttgcatttttgataacattattggctggtttatctactggtataggaagttgtatagcattttttgctaaaaaaacaaatactaagtttctttctataagcttaggattttctgctggtgttatgatttatgtttctatgatagaaatttttcctaaagcacaagatgctttgacaaaatctatgggagagaaattaggaagttggtcaactgtaatagctttttttataggtatggctatcattgctgttattgataagttaattccacaagaagaaaatccacatgaaataaagaaaatggagaatatagaagaaaagaatatcaaaaaaaataagtctcttttgagaacaggtatatttacagcaatggctatagcaattcacaattttcctgaaggattagctacatttatatcagctcttgatgatgttacaatagctatcccgatagcaattgcaattgcaatacacaatataccagaaggtatatctgtatctgtaccagtttattatgccacaggagataaaaagaaagctttttattattcctttttatctggtatgtctgagcctttaggagcgattattggatatgtacttcttagaaattttttaaatgatataactcttggaattgtatttgcaattgtaggaggaattatggtattcatatcactagatgaattattgccatcagctagagagtacggggaacatcatttatctatttatggattgattgcaggaatgggtgttatggctattagtttattactatttaaatagctttttaaatatatgattgtaacctaaaattagtatcaaaatgatataattatttaaatagatttttaagctatttaaaaatatcattttggagaatgagtgctatggaaaagaaaataaaattcaaatttgactggtatagttcacctgataagatagagaaatggttagaagatattgaagctaaaggatataatttatataagataaataaatttggaggaatattttattttcataagggaagtccaagaaaaataaaatacactgttgattactactatgatgtagagaataattattttgatgaacataaatcaaatggctggaatcttgtatttaggagtattggtagttttatgggtacatctgcatggtatatatggtcgaaagaatacaaagacatacctcctaaattatatagtgattctgataaaaaaaacaaagtaaagtcaattttatttatgaatatgtttatattctttatgttagtagtaatatttatatatttattgaatattgaaataagaaatttatatagtggttatggagcatctgtaactgctattgtactacagattatattgttgattttatatgcagtacaattatataggagattaatgtattatttaaggcttaaaaagtttaaataaataaaagaaggtgtcctaaaattatttttttaatattttaagacatcttcttttgttagtaaagtactgtttttaattatagtaatttctgtctttaaattgaaatatcaaataatagttgtattggattgagtattgataaaaataatttaaaaatgttatcctaaagtatcagatatacaaaattatctttaaatatattataaatattttaattgtattaactagaaattatgtaaggaggcattttatgattaagatagcagtttgtgaagatgaaaaagaaacacaacttttaatagaagattaccttgagaatatattaaaagatataagtatagaatatgagatacaaaagtatatatctggagaagagttactggaaagtaatttaaaagatatagatatattacttcttgatataaaaatggaaaaattaaatggaatggatactgcaagaaagattagagaagtagacgatgaaatggaaataatatttgtaacttcattaatagattatgtgcaagaaggttatgaggtaagagcttataggtatttactaaagccaatagagttggaagaactaaaaaaacatgtgctaacttgtatcaaagatattgaaataaataaggaaagtcatattacaataaaaaataagtctaatacatataagatttatttaaatgaaataaaatatatagaagttcaaaaaaaagatatgctaatacacacaataaacaagaattttgatataaaatatagtttaggtaaaatagaaaaagaattaaatccatataaatttataagatgccataaaagttttatagtaaatttaagatatgttgaaaatataaagcctaatgctgcaatactggaaagtggagaagaggtacctattagtagatatagatataaagaagttaaggagaaatttttaaaatttcttggtgatacaatatgctaaattttatgaatgagctattagtagttttatctatatttatacagttttctataatgaacggaattttaatttataaaaaggatagtaaaaaaaatgaaaaaatagtattctatattgtcttgtttcttatttatattataattcagataagtagattatttaatggaggaagttactttagtaatataaactatttattttatatattagcatttattgcttggggaggatactataattatttttataagatggattatattaagtattccattttcttttatctatttagtgtatattataaatgtttggatgctgttatatatagaatactattttttgcaattacaggtaatgttatttcatctaaagaatccttattagtacctcacttagaatctataaaaattcagatatatagtaatttaataattattcttatatatcttgtatttagcttttttaggaagtctataaaattaattagccaagataagagaaattatgtatatttattatttgccttattagctaatacaatgaatatgcttgtaaattatgtattaaaaaaattagaacggtttgggtcattacattcagaaggatactattttgataattttgttaatccaaagttggtaggagctagtagtatatttcttatattattgtttaaagaaataataaaagagaatagattaaaatctcaagctgaattaataaaaaataagttagatatgcaatatgcgcattatttaagtattcaagaatctcatatgcgagttaagaaactatatcacgatataaataaccacatttattgtatagacaaccttagaaacaatagcaaagaaattaatgaatatgttaacaatttaaaagatgaaataaaaacatttaaatatatctataatacaggaaatatgatattagacattataatcaacgaaaagagtgaaatatgtttaaaaaaaggaattaaatttacttgctctataaatttttcaaaagtaaattttgtaaaacctatagatgtgtcaagcatattttctaatattttggataatgcaatagaagcatgtgataaaatagtggatgaaaatattaataaatatattagaattaaaggaactataacaaagtcattttttgtacttaaatgtgaaaatagtaaactaaatcagcttacttttaataaaaatatattgttaacaaacaaaatggataagttcgtacatggaataggtattcagagtattaaatcttctttacaaaaatataatggagaattattatttgaaaatagtatcgataaatttatactaaatatatatataccattggagcaagatactgacagttggggcgattaagttaccagttgggacatatgtattgatacaaaaaaataaggatgttatcttttaataacaaaagataacatccttatttctgtattaaggagcttataattttactaatagtaagttataagaattggataggaaggtgatatgtattgaataataaatctttaatataaagaaaatataaatatattctaatgcaatgaataatactttagagcggttagtgtgatgggaggattgtgtatgaaagtaaaaaggaatataaatagagtggcaataattgtggctttaaatcttagcttagcattgatggcaggatgtatgtctcctgtatctgataagaacttaagtagctcagaacaaattagtaaagattcattgaaagaacaagttgaagataaaaaagatgaatctatcgagctatttaataattactcacaaaagattaatgatgcgaaaggtagagaagaagtaaaaaaagatttatctcaaagattttcgaaagctataatagacagtggttatagtattactgactcaaaatcagatggtagctttgtagtatctataaatggtgctgaaaaaccacctgaaaaaaatattcgaagtttattctattctatgtctgaagacgataaagaaggaaaagtaacaatagatattctctgtgctaaagagtatccagaagatgataagttatctgagagtgataaatatattaaatttatatacaatttatttaaatcattgactaatacgaacttaactgagaaagaaattttttctatggttgaagaagaatttaataagggagtaggtgttgtggagcttccttatatgaaggatatacatgttgaagttaacaaagttaaacaatcaactaaggttttaaaactaagtctagtatacaaatttgatatttcaaatcattagtatattagaaataactataacaatatagaaaatatatcatagaaaatttttttagattttataaatttaacaaaaaaagtattaatatataggtgttcaaggtagatgaaaaaaaaagttattttgcttccattttatgctaaaggacagtataatataattaaagtatgttataacatacaaaaatgtagtatatattatccaaagggggattttaaatgagtcaaactaatagaatagaagcatttagacaagaatatattaattctaaacctatgatatgttgtgaaagggctagaatttttacagaatcacataaaaaaactgagggagaagctatctgtataagaagagctaaagcttttttggagacatgtaaagaacttcctataaaaatctttgaaaatgaattaatagtaggtacagcaggaaaatttagaagaacagggatattgacaccagagttttcttggcaatgggtagacaaagaaatggatacttttgataaaagaactcaagacccatatgtaatatcaaaagaacaaatagaatttataagaaaagaaatatttccatattggaagggaaaatctttggaagaagttttcttagcaagaatcccagaagatacagctaagatattagtagatacaggaataatagataatgattctaagtggagacaggcagttggtgaagtaacaccagattatcaagatatattgtttgtaaaaggatataaagggattaaggaagatgcagataaaaaaattaaagaattagatatatcagtttcagaaaatattgaaaagatagatttttacaaatctgtttctatagttgcagagggtattatgacattggcacaaagatattcaaatcttgcaaaagagatgagtaagcaagaaacagatgaaaagagaaagttagaacttataaaaatttcagagatatgtatgaatgtaccagcaaaccctccaactaatttttatgaagcaatacaatttgtatggtttgttcaattaggtggtattctatcagaaaatccattggcattaaatttaggtagatttgaccaatatatgtatccatattatgaaaatgatgctagagaaggtaaaataactgaatcagaagctcaagaattgatagaagcactttggattaagttatcagaatgggtatggactatatcagcaaatacagcaaattactttgcaggatataatcaattccaaaatcttactgttggtggtaaaaagagaaatggtactgatggaacgaatgatatctcatatatgtgtttaaaggctacagaaagtgtaaaaactcaccagccaggattaagtgttagagtgagtcaaggagcaccagataatttcgtaatggcagttgctaaattggtaaaacaaggaactggtttccctgctatacacagcgatagtgcaggggcacaaatgttattacaagatggatatgatgcagaagatgctagagattggagtaactgtggttgtgtagttcctcattttagaaaaacaggacagtggacttcagccgtaaatatcaattttgcagcagctttagaatatgctatgaatgaaggtaagagtagattaactggagaaaaaatggggttagatacaaaaaatatcacagaatttacttcttttgaagaacttaaggatgagtttttaaagcaattagcatatcttgtaaaaagttctgttataggaactactgttgctcaacaaattcataaagaaatggtaccaagaccatttttatctacttgtgtagatggatgtttggataagggagttgatttaagtaaaggaggagcaaaatataatataggtcctgtattaactggtatagggttaggtgtagtttcaaattcattggcagctataaaaaaattagtatttgaggataaggtgactacgctagaagaattaacaaaagcactaaataatgattgggaaggttatgaagaattaagaaaacttgcgttggatgttcctaagtatggaaatgataatgattatgtagattcattagcaattgaagtttctgatttttattatactgaaactagaaaatacaaggatatttttggctctaaatttaatagtgcatttatgggtatatcaaactatgtaccaactggaaaaatcgtaggtgcaactccttgtggaagaaaagcgacaaaacctttgacagagggagtttctccgtttgttggtactgatacaacaagtccactagcagccatgaaatctgcatcaaaaataaatcatgatgttcatactggtggaacacttctaaatttaagactgaatcaagatttggtggaaactgaaagaggacttagaaatctaacatctatgattaaatcatattttgctttaggaggattccatgtacaatttaatacgatatcaaatgatactctattaaaagctcaagaaaatccagaagaatataaagatttattagtgagagttgctggatatagtactcaatttgttaatttatcaagagaaatgcaagatgctataatagctagaaattcacatagcaatttttaattatgaggtagattatgagtaaaaaaggtagagttgtaaaagtacaacatttttcagtaaatgatggagatggaataaggactactatatttttagaaggatgtaaattaaaatgtaagtggtgttctaatccagattcctggagtaacatagtaaaattaggtgttatgaaagataaatgtgtatcctgtaatagatgtatagatgtttgtcctcaaaatataagttcactatttgatagaacgcaaataaataataaatgtgatttatgtggagagtgtatcaaggtatgtcttaaagatgccatttgtataatgaccgaaaaaatgagtgttgaagaaatagtagaggaagttgaaaaggattttatatttttctttgaatctaatggagggataactttttctggaggtgaacctacacttcagattgattttttaagagaattagttgatattttttatgataaaggcataaatattgcaattgaaacttgtggatattttgattggaataaggtaaatgatgtatttgagaaaatagaccacatatttgtagatataaaatctatggatgataatattcataaagaatatacaggagtaagtaataaaattatattagataatatatgtaggctttcaaagttgaataaatctatggttataagagtgccaattatttatggagtaaatgatagtgaagaaaatataagaaatactgcattatttgtcaaacaaaatgttccaggaggcaagatggagttacttccatatcataaatttggaatcgataaatataaggcattagggcttgaagattatatatatgaatttgatgaaatttgtaacaatcatatgttaaaattaaaagagatagtagaacttacaggagtaaaaatcatagaatacaaatagctatcaggaggattttaacatggataataaatttcctaatgtgggagaaaatttaaggttattgagacaagaaatgggcataagtttagacaaagcttcaaagatgacaggtgtcagtaaagcaatgcttggacagattgagagaggtgaatcaagtccgacagtatctactttatggaaaatttcatctggatttaaaataaattttactacactattaaatgaaaatacaaatacctatgaggttataaagaaagaagaagtagagcctattgttgagcaaaaagggaacatgaagttatatccaatatacccttttagccctcaaagaaggtttgaactttttataattgagcttgaggaaaactgtactcatgtttcatctacacatagttatgttttagaagagtatgtactcgtaatagaaggtaaacttgaccttaatgtggatgggaaaacttatattttagagtctggacattctattaggtttgatggaactttagagcatatatataaaaatttaaataaaggaaaaactatatttcacaatatagaggtttatagataattttatagttatccttttctaaaataaatgaaaattttagaaaaggataacttatttttataatgtcgaaaagatttatatgtatgtgatgatgttattgttttaaaaaaaacataaaagcattataataatattaacaaaatagaataaagaggaagagaatatgattataaaggtttcaatgacagtattagtattaatattattgtatattctgtataagtatgaaactcagcatatagaaacgacagaatatactattttcaacaaaaaaattccaaaggaatttgataactttaaaatagttcaagtgagtgatttacataataaggtgtttgataaaaataataaggtattgatagataaaattgaatcattaaacccagatgttatatttataacaggagatttagtagatggagaaaataaaaattttcaagttgcattagatttaatagataatttggttgaaaaatatgaagtatatcatataattggaaatcatgaacaaaaatctttaataaaaaagtataaacatctatataaggattattttaaggaactatattcaaagaaaataataaatatggaaaatgaatctgtaagaatatatagaggtaatagccatcttaatttatatggtttaattataccattggaatgctatccatatttatttgctaataacaaaaaattagaactaagtgacaattttgtagaagacaatctaggtaaagttaatgaaaatgaatataacattcttttagcacatacaccatttttctttgaaaaatatgcaaaatggggagcagatttggttttagcaggacatgttcatggaggtataataagaataccttttgttggaggtgtattatctccaaatagagagttctttcctaagtatgactggggaaaatatgaaaaagataatagcactatgattttaaataaaggcttaggaggctcaaaagttttaattaggcttaattgtaaaccagagatagttaagattacattgaagtatgagaaataagattttatataacatatataaacatcaataacatataaataaggttgatgttaaatccatttaaacatatataatgaccaattttgaataattgttgaattaataaaaataaagtgctatttttagcatagaatatttaaactatgggggggagtaaagaatcatgggtgatacaagtagattttatgagtctgtaaaaaataaatatccgaaattaaaagatggaactagggttcatctgtggccaaaagaaaacattataattggtcctatttatgatgaagaagatggatataaaaaaagtatcggaaatgtggatagcttaagttggaagcaaattgttatactggctgaatgtgatgggaaaaatactactgacgatataataaatatattatccaatagatatagaaatatccataatatgaaagaaaaagttatggaattttttatgttttatgagaatgtatacttaacgtttgaagatgatatacagacactatcaagtgtatttgagataacaggaaataaatcatacattactcctttgtactttactatagaaatagatggagataataatacaaatgattatttttctgaaatcacaagtttattgaactgcatgtatgagaaaggctgtagatttatagaggttattggtgaggatattttaaaaaataaaagtatgagagaaatatttcaatatatgttagaccattttgatttaattgtggtaactaaagatagctttactattgatagaagcttaataaaagaattagataattatcgtcataaagtgatatggaaagtatattcaaaaaatgatgatacacgtattaaattaaaagaagatataaaaataaccagtttaataaaaaggggtcacactgtagtaagaggagacagagaaaaagcaataaaaatagaagatatgaggtttaaagatacaaaggagaggttttcaaaatatggagcagagtggagtcatttatatatttcttctgatggtagtgtaaaatcttattcatttcaaaaagataaaagagtctatttaggcaatatatttaacaattctgttgaagaaattttcttagagatgcaaaataaaattgacaaactagaaattgtgtatcaataagggtaaagtttaagatttatataagatttatagattgtttatttaagtttgtgtcaataattataatgaggtgaaatgacttgttaaaattattggacaaatttttttatgatgttttacttaaattttggctgtttatgatgctgtggatttttagagaactttttacaaatttcaaaatgactaaaaaatttaaatttcataaaatatttatgtaaaaatcatataaaattcatatagcatatgtatcatatgaggtgtagaaagactagcttaaaaaccataatataataccctattgtaatgataaccctccctcacatcctcaaatagagttatcattacaagaattaatccataaatttaaaatttatggtttttttttatttaatttgttttattatattagaatatgatttattatagaatatataataagtaatatagaatacattaattaagtttttgaaatgtaactatactaataaggaggagtatttatgaatgtaaataatcacaagtgcccagagtgtggtgaacatagtaaaaagtttgaaatagtagaggaaaatgaggattgtgtaatatttgaatgttacacttgtggaactatatctatattaaagtattgtgagaactgtaaagaatttgtatttgtaaatattccaaataatgtggagacatatgagtattgttgtggaaaatgtaataataaaatttaatataatataaacatatgtaatttcatatatcatttataccaatctcatataaaattcatatataaaatgtattatataaatataggaagaactagcttaaaacataatataattaccctaaatttataatgacaactctccctcacatcctcaaattatagttgtcattatagaataacttggctgtttcaaaaatgtgaaatcattttagaaacagcttatttttttataaaaataaagaaggcaacgggaagccttctttcgtgtaaaaaaagtttaattttttgttaagatttgtttgttattttatattacttttataatatgtttttatttggtggttggcaatggattttgcacaactggtcattattaatgtaaaagtggaatattattaataaataataattacaaaattgtaatctttatttattaaataaatgagtaaaataatatattaatgggtatataattaagacaatactagtttggggaggataaaattatggattataaaacaatcatattaaatagaaagtctgttagagaatataagaacatagatattaaagaagaatatcttagtgaaattaagaaatactcagaatcttgtaagaaactagttccagaaatagatgttgatgtaagaattatgaataaaagtgaagtttttaataatttagataaagtagcagggtacaaaggaaatatgatagattctccaagttatattataatattatctgacataaaagataattacattgaaaattcagggtacataggagaaagtataatctttaaagtaacagaacttggaattggttcttgttgggttacttttgaagatggaaaaaaggtaaaagaaaaacttggaattaattcagataaagaggtaacaggaattatagctattggatatggagaaaatgtaagtaatgctaaagtattaaatgctacaaaaactgggcaaaattattcaaaatctgatatgcaagttgtaacagataaggggtctactagactaggtgtagaagatgttgtttatatgaacgaatggggaaatgttgcaagtatagaaatcttagaagaaagagcacttcttgatgcatttcactatgcaagattagctccatctacattaaatagacaaccatggagatttatagttgatggaggcactgtagttttagctgttagaaaagatggtcatactaatttatatgaagaaaaaatagacattggtatagttatgctttattttgcaacaataataagtgcaactatgtttgatttaaaatggaatttaggtactccagacaaagattataaagtgccagaagactataagatagtaggatattgtaatatataagatagtttaatacttaatttaactacacttaaattaatttttataaaaagttcaataatattttataataaaatgttattgaacttttttattgtataatacaatttttatatttattgtattgattgaaaaatacttatgaatttaaatgcttacaattttgtgcatgaatagagaggtatattattttattaaactgtataatttgcttggaggtaatatcaaatggaatggataaataaattaaatcaagctattacttatattgaagaaaatctcgaaagtggagtggattatgcagaagcagcaaaaattgcatgttgttcaacctttcattttcaaagaatgttttcatatattgcagaagtaccattatctgaatatattagacgaagacgtatgactaaggctgcatttgaacttcagaacagtaacatcaaaattttagaactatctgagaagtatggttacgattcaccaacatcttttaatagagcttttcaaaatatacataacatttctccatctgcagctagagcaaagggtgttgttttaaaagcatatcctaagatgacattaagcatttatgtaaaaggaaatgtagaaatgcaatatcgtattgtagaaaagaaagggtttcgtattgttggtataaaagaaagtatgaacatgattgtagaagagtgctttgagaaagttcctaagttatgggctaaatgcataaaaaatggaacaattgataaactttcagagttaataaataacgaaccttgtggattgcttggagttagtgtgtgtacaaatagtaagggtttagattattatattgctgcaccaacagataagcctgtattagaagatactcgtgaatacttaataccatcaggtacatgggcagtatttgaatgtgtttctccaatgccaaatgctctggcaatacaggaattgcaaaaaagaattattactgagtggttaccaagttctgggtatgtgtatgctaacttaccagatattgaactttatcccaatggcgatatcaatgctcctgattatactacagaagtttggattccaattcagaaaccaagttaaagttaatgaataacattaaatttaataaacaacatgaaattttaaaattacaggctgaaaatagtctgttatttttttgtaaatatggaaagcaagctttacataaatgaaatatagttgtataattatggaaagtagactttccgtagttgagatattaaagggggatagatgtgaaaaatagattagaagaaataagaaaagaaagaggcataaaacaagaagaacttgcttctattttgcaagtatcaagacaaactataggttcattagaaaatggtaggtataatccttctatcatcttagcctttaagatagctagatactttgattaaaaaatagctacgcacacttgtgactttagtcatgagttagtagctaaaatagtcagcatatagggaaacttatatgtagagataggatagaacctatccaatactacttgaattgctaaaaacccctaaagctaaccaaactaaaacataaggatgaaataaacctaagtgtgaaagttacgaaagtagaaaaaattggttagatggtataaggttaaatcctaagtactttaaaatgggcaatcagcaggtaagctccgaataggagaaacttcaacgactattcctcttgagggaagtacactacaagctattggtagtggaagtgggtagaccttaacggataatgccgaaggataagatatagtctgtgcttacatgaaagtgtaagaagttcataagagaactgcataggtagtagcgaacttatgtgaacgacaacctcaaaaatgataaaagttaagacttacggttcttatatatgttatttaaaaataaatataaaaaaccttcaaaatacttgttttaagtaattgcatattttaatattatgataggtgatgaaaaatggaagttactcatggtagaggatatgcatataatatgtcaaatatagacatccagtattatggggagacatctttggaatcctagttatttcgttgctactgtatcagaaaatacagaggagcagataagaaaatatattaataatcagaaaaaacaagtaaagtgaggtggcagtagtggaaaaagcttataagtttagaatgtatccaaataaaaaacaacaagagttaattaacaaaacttttggatgttgtagatttgtatataataagtatcttgctaaaagaatagaagtttataaaaacgataaagaaacttttacttataaacagtgtagttctgatttgaccaatttaaaaaaagaattaaaatggcttaaggaacctgacaaattttcactacaaaacgccttaaaagatttagataatgcatataaaaaattctttaaagaaaaagcaggatttcctaaatttaaatcaaagaaaattaatagattttcatataaaactaactttacaaatggaaacattatgtattgtggtcaatatataaaactacctaaacttgatatggttaagataagggataaacaagtacctaaagggagaatacttaatgctactatatctaaagaaccaagtggtagatattatgtatcattatgctgtactgatgtagacattgaagcatttgaaaatactaacaatcaaataggtttagatttgggaattaaagaattttgtatctcaagttgtggagaatttatagaaaatcctaagtattttaagaagtcattaaacaaacttgctaaattacaaagagaattatcgagaaaaacaatcggtagtttaaatagaaataaagcaagattaaaagttgcaggacttcaagaacatatagctaatcaaagaaatgattttctacaaaaactatctactaaattaataaaagagaatgatattatttgcatagaagatttacaagtaaagaatatgattaaaaatcgtaaactatctcgcttaatttctgatgtatcatggtcagaatttattcatcaattaaaatacaaggctaattggtatggtagacaaattgtaaaagtaggcaaattctttgcaagttcacaaatatgcaataaatgtgggtataaaaacgaggaagttaaggacttaaatataagagaatggatttgtcctagttgtaatgaaactcatgatagagatataaatgcaagtataaatatattaaaagaaggattaagattaataacaattcaaaataaataacgtatgtaagaaccgtaggaactacggggatggcctgtggagaattagtaagacatattttagtatgcaaaattctgtgaagcaggaaccctgtgactttagtcatgggaggttcagatgagtattgaagaaatatttatttatgaggaggagtaaaaatgaaaaagaatatgttatatcttggaatagtatattttatttgtggaattttacttgttttattggctacgtttactgagttttcatttgaggcttttatttggggattatctggagctgctttaggtccaggtatatgtatgatttttcaatatatgtattggagtaagcctgaaagagcagtagattatgaagaaaagataaaaaaccaaaggatagagatgaatgatgaaagaagagttatgttacgtgataaagctggacgtatcactaatcaaatcatgtcctatgttcttgtaattcttatatttattgtttctatattgagtgtattttctgtaatggtaataagcaagtgggttttagttgttcttggattgcttattttatttcaatttatttgtagtgttgttgtatacaataaattagataaaaagttgtaataaaaagtttaaattcacaataaaaatattggatttttaaactttagattcttaagacagttttagaatatatctttatatacaattatataaatttataaaaagccataagtatacattgtattttgtggctttttgtggttaaagattatagatactttaaataaaaatactgcagtactttatttgaaagtaatttttatataaattcatattaatagtcttggatggtttcttttattaaaggttgcagtagataaagaattaattaagattgcatatcatataaattataaaattttttctcaaccaatttatcataaagataagtgatggtataagaatttttgtgattttatttttattgttaaagagatgtactaaattatcatatagattaggaattattgagaactattttttgtataaaaaggagctgattcaaattgttatgctattcccttgtcaatcatttcttgtatcattccagcaaatccaaagctattatacataaataaaactacattcgcattactgtttttaattatctcatcataggtcatatctatattttttatatatctaggatctagtatttcgagttccttaaaagtatcagccaacatccaagtcataggtgcttggtacgaatctctaaatataagggcctttttattagttaaagagcttgaatttctaatcttaagtatgtgacaatcacaacctctcatataagctccaccatagtcccattctcttttatcttttaattttgcttttatgatattttcattaatctcagtatttttagtaccattactaataaaatatttgtaatttgcatcacttatttcaacatagcttatagactcttttttcttaagtggatatcccatctttttattataactacctataaagaccttgtcatttacatatcgagtactgtatctttttaaatgactatctatttctgatttagataagccaaggtctaatttatcaagaataaacttatattcttcaaatgctcctaatgaatttccgtgatggtctgtttttaaaaagaatttttctctctctttttcggtaaaacttctataaaagtaatcatctatatctaagaaatttatgtctgttaactgcttttctaagttttctttgttaatatctatattatttttaccttctataccacttggatacaagtgcttaagcatatttgtcttatgaggaagtgaaacaaagtaaaaatctttttttctatttaacttactcaagttattaatggctttggagtaagattttatatgataatcagataataatttagcaaagttgcctaatagccatccatctttagttagataatacttttgtttaatctttttattttgactctgcataatatggacattaaaaacttctttcattgtaatataattttggttattattaaagataattaagaccatcaataatatcactgatactataggtagactatgtcttttgttcaatatgctacatctccttacttttattttgattagtttatttttaccaaagcaataaaaaataaacaataaaaagcctctattaaattttgaatttaatagaggctttttatttactactttattcctttatctatcattgaatctatcattgaatcaaacccagaactattatacataaacattacaatatctgcattactttcctcgattatctctttgtatgttttatatattgagtttatatttctagggtctgctatctctacttctttaaacatatcagcaaataaaagtgttgtaggagcctgatatgaatctctaaatattagtatttttttatctactaatgctttagggttttttatagttaatatattagttttagctcctctaatgtatgcaccaccataatcccactctttattatctctttcagttgcataaacttctttttcttctttttcttctttttcttctccatttatatcaaagctataatcttggttatcttttgtcatataaactacatattcattttctttaattagcatatctatattttgattataacttcctataaatttcttatcagtaattatagactttttatagctactaaaatgcttgtctaaatcttgcttagatagacctaagtccatatttgatgccatcattttaaagccttcaaatgctccatatccagtccaatgatggtcagttttaaaatataaattttctctttctttatctgaatagttacttaaaaaatactcatccatatctatatatttaattaaatctggatttaatctatttttaaaattctttaaatttatgtctatattatccatattatcaacatatttaggatacaaatgttttaacatattagttttatgtggcatcattgtaaaatacacattttttcccatatctttacttagattagataaataattaatggatttttcgtatcgacttaattgtttttggtctaaaatttctggaaacatacctaatatccagttatcttttcctagataatagttacctaccttagttttatttaaattagcctgagtccttgtatttattgatatcatttcatctctaaatgcaaaatggtcattaaaatattcttcaaacttggctataaagtcacatttttttaaattttctacagtcggaaattttgcaagatttctattttcagttatacttaattttttctttggaagtgtgaagtttagtatgaaaaatccaaatactataattaaaaatgaaatggcaacaatccttggtttttttttactcatgtttatacctcccaattagaatctaaaatataagaatggattataggttgagctacttaacattattattacaataaacatacaagaaacaatgaaaaccacattagtaacttgatataatgtgctatttaatgtatttttatttttcttaattaataatgattttacaacttttacaataggagttgatagaaggattgccccaacaattatataccaatattcaattataaatacattgaatgcatcactgataaccggataatttccagcaccaaacataatacctataaatttaatagctgctggtaaatcatcaactctaaaaaatacccatccaatcatgactataagaagtagatatatgtgtcttacaattcttggcatcttatatagaaatttttctaagaatgctttttctactgatattaatattccataatatagaccccatataataaaagtccaactagctccatgccacatcccggttaaaaaccatactacaaatagatttctatatagttttgccttagagactctacttccacctaatgggaagtacacatagtctttaaaccaagtacctaaagatatatgccatcttctccaaaactcagatactgtttgagagatatatggatagttgaaattttctaaaaactcaaatccaaacatcttacctaaaccaatggccatatcactatagccactaaagtcatagaatatttgaagtgtatagcaaactatacctagccatacctcaagtcttgataaatctccagctgacttattaaatacaccatctgcgattacacctaattgatttgctagaattactttttttccaagaccaacaacaaatctgtttacaccttgagtaaatttgtcccaattgtgttctctatactcaatgctatctgcaacagtctgatatctaacaataggacctgctacaagctgagggaataaacttatgtataatgctaaattagctaattttctttgaactttagcatcatttctatatacatctattacatagctcattatttggaatgtgaaaaatgagatacctaaaggtaatttaacctcaggtatagttatatctgtattgaataaaaaattaatattatctataaaaaaattgctatacttaaatacagcaagaatagatatattgtaaataacagaaagcacaacccacatttttttatttttactgccagaaactttaataccaaatatatagtttactattattgatagtatcatcaaaaaaatatattttggttctccccatgcgtagaatgcaatacttgctagaagtaacataacatttttatacttaggatttgccaagtaatagcaaatgagtgtgactggaaagaataaaaataaaaatattaaactactgaatatcatattagactcctttcttaaccaaatcaattatatctttatctaaaatatatagcaaagtaagtattttcaagttttaagtacttaattgtatgaatttatatgtgtttttacaagtttaattaatctatatgtaaattttgacttttcatataatttttttaaaatgatgtaatattaaaatgaattaataaagctattataataaagaaaaatcaaggacatattacttaactatatgtgtttacctttgattgtgcctctatacagtctattaagatagatgttgtttatatctataactgtaaaaagaactctttattaagtattagaatcagaatactttcagatatgcttttatcgcaagtttgttttaaatgacaaatactttaaaataatatcgaatcattatactaaataattatgattgattataaattttattttaattattgcttccatagtttccatttgttgtaaaaaagttactatttgttgaaattggtatattttttagatattatctatgtctaataattaaatttataaatatttctttattttttatattaggatatttttgagaaatgaaatacatcttaatttactttggtatgaatatttttatggatattttatcacaaaaaaataacccttttacaactaagggttactttttttctttattttttcttattatatcattattttttgtttatttcaatattttgatattttatccattatagtgaaaatatatcttgagcttttcagattttataaactttacaaaatatacttaaaattaacacattttatttacattgtattacacttaattcttatttttatcattccacaaataaaaaagaataagataataaataaaatacttatcaccttattctttatttaattattttacaatgaaaaatctaaactactttttaaatagcttcctcttccattaatttatttgtatattactgatttaactcttcaagtaactaattgattgttgcaacactttatcctaaactctagaaactttataaactacatctctagcatttggtaaatttccatctggaacacctacagcaataccaaatggtacagaataaccttctagtatatcaagtagttctctgtattttttatttgtatcaaaatttttagagattgggaaaaaatcaatatgataagaagtatggatttattaagtgaatacataaaaaatcctactttgtttagatatattttaggagttcaagaagttatgactatggtatttatacttatacaaggctagaaataaagatgaaagaatattacaataaaaaaactctttagtatatactaaagagttttttttattggtgccgctgatgggactcgaacccatatggtttcccgtacgattttgagtcgtatgcgtatgccagttccgccacagcggcttatattttaaatccaaactacttgtatatcctaccagattttccaagaatatgcaagaggaatattgaatacaaaatactcatcaaactgtaaaacattataaaaacttatgaatcaacacagttgattttgaatccattgtatttaccaattcaaccattcgggcatgtcatgtatattattatagcaaaaaaatatattgtttgcaacatatttaattttaatatactattattattatgggaatattaaataacactatattggtatataatatatatgttacaaaaatagataatttttaggagtgatataatttggaaaaaaaattaattataatagatggaaattcaataataaacagagccttttatgctctgccagaaatgaataataaagaagggttaaagaccaatgcaatatatggatttacaacaatgctatttaaaatgatagatatatataaaccaacacatataagtgtagcctttgacagaaaagcacctacatttagacatttagaatataaagagtataaggctggaagaaagggaatgccagatgaactggcagaacaattacagccattaaaagaccttttagataaattcaaaataaatagattggaaatagatgggtatgaggcagacgacattataggaactgtttctaaaaaagcagaaaataatgggtataaggtatacatagtaactggagacaaagatgctattcaacttgcttcagataatacaactactcttataacaaaaaaaggagttggagaagttgaagaatacaactttaattctgtaattgaaaaatacgagatgactccagcacaatttattgatttaaaaggtcttatgggagataagtcagataatatacctggagtacctggaatcggtgaaaaaacaggtataaagcttataaaagagttttctagtatagagaatttaatagagaatacagataagcttaaaggtagtgtaaaaaagaaaatagaggaaaataaagaaatagctattcaaagtaaaagacttgcaacaattataagagatgtgccaatagaagtggatttagatagtatggtttttggcgattatgataaagatgaacttttagataaatttagatactttggatttacaagtctcttatcaagattagttgatttggtcgattcagatgacacagaacacgtagaagaaaaaatagaaatattaaaattaaaagatacagaaaaatttatagatgaagtaaacaaaaaaggacaagttattttaaaaactgttagaggacaaggtaatatacttgaaaaaaatataatatatatttttataagtgtagatggagaaaaaatatattatgtagattcaaatgaagtgtcaaagttagatagtatattttcaaataatgaaattaaaaagtatggatataatttaaaagatgattatatatctttaaaaccatataatataaacttagaaaatatgtattttgatataacaatagctgagtacttaatagattcaacttcatctacctcatatgattgtagtgcaatagctatgaagtatttatcaaaaaaggttaaatcaaaagaagaattattaggaaagggtgttaaatctaaaaactatgaggatttagaatttgaggatttagcagagtatatgggtcaaataatatgcacagttaaagaaacaattcctatgatggaaagaagtctaatggatatgagtatggatggtcttttttatcatgtagagatgcctttagtagaagtcttaggtcatatggagtatgaaggtataaaagtagacaaaagtatattggatgaattgagtgtagagtttaaagaaataatagctacactagaaaaggaaatttatgaattatcaggagagccattcaatataaattcaccaaaacaattgggtgttatattatttgaaaaattagagcttccaataattaaaaaaactaaaactggatattcaactaatgcagatgttttagaaaaattaagagataagcatccaataatagataagataactgagtatagacaaatagtaaagttaaattctacttacgttgaaggacttttaaatataataaatccagaaagtaatagaatacattcatcatttaatcaaactataacgactacaggaagaatttcatctacagaaccaaatcttcaaaatatacctataaaaatggaaatgggtagaaaaataagaaaagtgtttattgcagatgataactgtaagttggttgatgccgattactcacaagtagagctaagagttcttgcacatatgagtcaggatgaaaatatgatagaagcatttaaacatcatgaagatattcataccaaaacagcttcacaagtttttaatgttcctatggaagatgttactagtgaattgagaggtgcagctaaagctgtaaactttggtattatatatggtaaaagtgactttggtctagctgatgatttaaatatacctgttccaaaggcgaaagaatatatcgaaagttattttgctaaataccataaaataaaagagtttatggacacaacagtagaaaaggctagtgaggatggatatgctgtaacaattttaaacagaagaagatatataccagaaataaagtcaagcaattttatggaaagaaatagaggaaagagatttgcaatgaatgcaccaatacaaggaagtgcagcagatataataaaaattgctatgataaatgttcataaaaaattggaagagaacaatttgaaatcaaaacttatactacaagttcacgacgagttgatagttgaagcaattgatgatgaaatagatatagttaagaaaatagtaaaagaagaaatggaaaatgctgtaaatatggatgttcacttagatgtagatttaaatgtaggtagttcttggtatgagacaaagtaggtgattttatgttgatattaggacttacaggaggaataggctgtggaaaaagcagcctatcaaatatatttagaaatcttaatatttctatagtggatgctgatattatatccaggaagatatttgaggataagttgttattggaaaaagtatttgtccattttgggcaaagtataaaaaatgatgatggaactctaaatagaaaagctcttgggaaaatagtttttagcgatgaagaaaaacttaaggaattaaatagcttgactcatccgcgaataagagaaaaaataataagtgaaatagaagaattgagaaaaaaaggcgaaaatatagtagtattagatgcagcaatattggtagaaagtggttttttagatatggttgacaagctattagtagttacttgcaaacaagaagtacaaattagtagaatacaaaagagagataattgtagtaagcaggaagcacttagtaggataaattcacagatgagtcaggaagaaaaatccaaatatggtgattatataatagataattcgggaacaataactgaattagaaagtaaagcacataaatttattgagtacatgaaggagaattggcgtgaatagtaagaaagtattgattctatctatttttataatcttatttggggcactattaatggaaagcaaagtaatacataaatttttatatcctaaaaaatattcagagtatgtagaaaagtattcaaaagaatttaatttagatgaaaatatagtttacagtgttattaaagccgaaagtaagtttaatagttctgctgtttcaaaaaaggaagcaaaaggattaatgcaaatattagatataactagagattggggagcagaggaactaaatttaaaaaatgtggatattttcgacccagagactaatataagacttggctgttggtatttaagtaagttatacaaagaatttggtaaattagatttagtgatagctgcatataatggtggttcaggtaatgtgaaaaaatggttagaaaataatgaatatagtaaagatggcgaaaatctacatgatataccttttaagcaaacttcaaaatatgtagaaaaagtaaaaaataattacgaacattataataagatatatggcaagaaaggaaaaaactaatgaagagaataaaagtcttaacagtcgttttagctataactcttatggtagctggttgtagtaatactaaaacaaaacaaagtagtagtgattcaagtttacaaagtcaaagttctatagatgctaagtatataaacttaacaatggtaactccaaaaactataaatcctataactaatactgataagtctgttggttatataatgaatttagtttatgatagtttatttactatagatgagaactacaatgtaattcctcaattagttaaggagtataatatagctcaggatggaatgagtatagatataaagctaaaagatgcaaagtggcatgatggaaaaaatgttacttcaaatgatgtaaactatactattggtttaattcaaaaaagtgcagatagtccatataatgaatttactaaaaatatagcttctgtgaatattaaatcagataaagattttacaataaaatttaaagctagatatgctttttcaattgatagtttaatttttccaatcgtatctcaaaatcatttagattcaaaggatgtaaatgacaagaataataatatgataggaaatgggaaatataaaatagaatcatatacagaaagagaaggaatggttttatctgtaaacaaagattactatgaagaagttccaaagaccatgaagaacataaaagtaggtatggtgcctaatgaagaggcaaggacatctatggttatggctcttgatagtgatataaccaatgttacattaaatgatttaagcaagtttcaagaaaaagagtttaatataacaaaatatcaaggaagagattatgagtgtgtattatttaattataataatccattttttaaagatgttaattttagaaaagcaattgctcactctatagataaagatagaattattagtgaaggttatatggatgatgctactccagttaattttccacttaattcaaaatcaaaatactataatagtgaaatgaaggatttagagtttaataaagataaggcgatagagtgtcttgctaaggtagaatatgcaaatataaactcagtaaatcaaaatgacaataaagtaaaaaatcagaaaaaatcagctaaaaagaactcaaagaagcttacgccagaagaagaagcaaaagctaaaaaagcagaagaagatagaatcaaaaaagaagctgaaaagaaaaaaaatagagaaaaagaggaagtaaagaaaagtctttctgaaatgaacttaaagataatagtaaacagagataatagtgagagaataaaaactgcaaacataataaatgaaaacttaaaagctataggaataaatagtacagtaaatcagctgtcagataaggatatggaaaatgctcttaattctaaaaattatgatttagcattagttggatggaaactatcaattataccagatgcaagtagtattatagcaagtagtggatatactgatgataagctaaatggatatatgtctgcacttacaagttctacgtctgaaattgaaacaaaaaaagcatacaaagatgtacagacatatataaaagataatgcaacatttataagtttagctgtgagaaacaactatattgtaagtaatagtagattaaaaggtaaaattactccaaatgattttgatgtatatgagggaatatctaatttagatataaaatcgaatgaatcaaattaaatgattaatttctatttaaaaagtataaactatatgatagaatacccttatggggtataaggaggtaattaaatgaagaagaaactattagtagaaggtatgagttgtggtcattgtgtaaaccatcttaaaactgcattaacagaagatatagatggtattgaagttttagatgtggatttagaaaataagtgtgcatctgtagatatgaaagatgatatatctattgaaaaattaaaagaagtgatagcagaattaggatttgaactaaagggaattgaatagaaattgataaactaaaaaaaggcctctattgggggagtaatagaggtctaaaaatgggggagattgagtatgtttgattttacattactattatctccccttttaaattaatatatacataaaaagtaaaaaaattttgtaatgactcacatttcttgagctttttgaatatactataaatagctaagggagggagtatcatggaatctaggggatataaagaggatttaaaaaaaatgatacttgatatggcccacaaagaacttgagagttatgtatcacaaaaaggagcaaaaaaatactttgaaggtaacttggataagattattaataataatataaaaaaattcaatcaaagtattggtcttaatagagtatatttaaaaatgttaaaaaagtgtgcatatcaagaaagtgtaacttcaatatcaaggactataaagaaagaagcattatttaaatcaaaaaaagagctatttgctttttcagagtacttaaaacttgatattaacaagcgactttcatataatcaaattttaagaaaaatatcaagatatatatactataatagaagttcatatgctcaaaaatacgttgttttcaaaagaggagatgaagaatatcttttagaaccagagaaaataaaagatgaattaatatcaagctataggtcaaagactagagaagatatgaggtcaatagcaaaacttttggatatagaagtagaagatgattataatgctgaagatattagaaaaaaagtaataaattatattatcaaagaaaaacttaaaagttagagttttaaagaataagttctgccaatttgcatgattaagtataacttgggtataaattttttgtgcatttgaaagagcttattctttttttgacatattcttttaaataatttaccaccatttggtaattggtcatcatcattcaaatttttaacttaatatgatttaaataaatttataataatgatataatataaaaaaaataaaaattggagagtgatttcaaaatgaagtttaatttttgccataacaatttcaatgttactaacttagaaaaaagtttagatttttataaaaaagctttagggcttaaagaggtaaagcgtaaggaagcagaagatggaagttttatattagtttatttaggagatggtattactagtcatacattagaattaacttggcttagagattgggacagaccatataatttaggagacaatgaatttcatctggctttagaagttgaggagtttgatgaggcaaaaaaacttcataaagatttagattgcatatgttttgaaaatgaaagtatgggaatttattttatagcggacccagataattattggattgaaatacttcctaaaaatcattaattttaaggatatgtttataatttctttacaattaataagagaataagttatcattaaattgtagggactaaaaatggataataatgttatgaatttatgactataaaaatttgttggggggagtgatagtagtgaagaaagctatagcagctttaggaattggggcagtagcagtatctgttagctccataaatgcaagtgctcttgaaaagggaacagtaacagcaagtgccttgaatataagaagtggaccaagttctgattgtgataaggtagcaaaattatacaagggaaaaactgtagagattttagaaaagtctaatggatggtataaagtaagggtatcgagttctgttgttggatggggaagcgcaaaatacatatcaacaagtggttcatctgaaggtacatcaaatcaaaataatccaacttcaagtgggacaactattagtggaaatggtaaagtaaatgtgagttctagactgaatgtaagaagtggtgcaggtactaactattcattagttggtaaagcaaataatggagatgtagtaaagttactagaacaaagcaatggatggtataaaataaaactatcaaatggagttactggatgggctagtagccaatatatctctaaaacatcagaggatgttggaacgaataattctagtaattcaaatagtactaataattctgataaaaaaccatctagcgaagaatcaattgaaggcaagaatggtaaggtaacatctgctgtgagtttaaatgtaagaagtggtcctgggacaagctattctataataggaaaattaaatggtggagatgttgttgaattaaaatccaaaaataatggttggtataaggtaaagttatcgagtggaacaattggatgggtgagtgccagttatatttctgagactaatgaaggtacaaaagaaaaaccaaattcatcatctaaccaaaattctcaatctaatagtaactcaaagccatcatttactggaaattcagataaatctacagcaaaaggttcaacaatcgtagattttgcatatactcttattggaataccatatcaatggggagcttcaggacctgataaatttgactgttctggatttacacagtatgtttttaaacattctgtaggcgtttctattcctagagtttctagagaacaggctaattttggaagtgcaatttctatggggaattatgcaccaggagatttagtttattttgacactgatggtgatggaacaactaatcatgtaggtatatatgtaggaaatagtaaatttatccattgtagtggtactcagactaatcctaataaggttaaagtggataatttaactagttcatattggtctaaagtattacttggtgcaagaagatttgtttagtaagtacaatttcttattaaaaaattagaagaaataattatttatattcataaattgtgactcttaaaaatatactttattaataatataattttgggagggacaaactaatgaatagaagaaaaacgatatacagaggatttaataataatagacataagattgatttacgtaaatatgttataacgattgcttgcttgtgtctaattggctattattcttatacaaaaataaaagatagcaagatattggagtatgtatcggctaaaataccatttctaaataattcatcagatataacttataaagatatatctgatgaattaaattcaataaaaaaagggaaaaaatctaaatcacaaaccaattcagatgataaacaagaaactaatccagaaaaagcggtaaataacactaaagagccagaagaagtcaaattagctactatagaaggctgggatatgtacactattcaagttgctgcaatagataataatgatgatttgaaaaaaatacagacatcattagttaataatgacatacctttttcagttatggagaaggatggagtaaaaaaaatacagacctattcctcttttgatgaaaatgatgttagaaagcagataagcagtgtaagaaaggtgtttccagatgcatttttatcacacttagatgcacctatgttgtctttagagtatacaagtaactacgcttatatagagagtatatctaaagaattaaataaattaataacaaactttaaagaagaatcaagtttttggtcgaatgctgaaaataatgtagatatggaaaaatataatactattttgacaaatagaaaggcaatatcacaaaatatatcaaaagaagctgaaaagattgactattctgaaatgcgtttatttaaagataatttaatagagtatgtaaagaatgtgaatgaaaaaattgatacagcttcaaaagcagcaaatgaagaaaaatatagtgtaagtaaaagtctgcttttatcatccatgcaggagtactctatgtttataaattctataaaataaaatacagaaaatttggactttagaaagctatatgaaaaggattgtttaattaagcaatccttttcctcagtttgacttaatatagaggtattgatttataaaataaattataaaaatacggatatttttttaacaattgttaagattttttaatatatatagtatacttatagaaggcagaaaaaatgtttttttatagataagggggtaaaacaatgaaactcttaacttttaagggagggatacatcctccatatagaaaagagtactctaacacaaaggcacttgaaaaagctcaagctccaaagatagtttacattcctcttcagcaacatataggggcaccagctaaacctattgttgaagttggtgatgaagtaaagtttgggcaaaaaataggtgaacaacaaggttttgtttcatgtaacgttcattcttcagtatcaggtaaagttattgctattgaacaacatgaagtaccaggaggttcagctcaatgtgtagttatcgaaaatgactttaaggaagaattacatgagagtgttcaaccaaaaggtcagttagaggatttgagcaaagaagatatagtaggtatcataaaagaggcaggaatagtaggtatgggtggagctacattccctaaccatgtaaaagtatctcctccaccagatagcaaggcagaagtagttatattaaatggtgcagaatgtgaaccatacttaactgcagaccacagattaatggttgaaaatccagaagatgttgtgtttggtttaagagcattaatgaaggtattagatgtcaaaaaaggatttataggaattgaaacgaataaaccagatgctatagaagcaattcaaaatgtagctaaagactatagtgaaatcgaagttgttggccttcaagtgaaatatccacaaggagcagagaaacaacttatttatgcgtgtacaggcaaagaagttccatctggtggattaccaatagcagcaggtgcagttgttgacaatgttgccacagcagcacaaatagctaagtctattaaaacaggtatgcctttggttgaaagaatcactacaataacaggtagttgcatcaaagagccaaagaacctaataacaaaagttggaacattagtttcagaaataatagaacaatgtggtggatttaaagaagataagaagattggtaaggttataatgggtggacctatgatgggaatagctcaatatactactgaaatagcgactaacaaaggttcttcaggaattttatgcttggatgaggaagaatcacgtactccagatattcaaaactgtttaagatgtggaagatgtacagatgtatgtccatcattcttacaaccacttttcataagtgcatattctttaaaagatgactatgacacagctgaatatcatagagcaatggattgtatagaatgtgggtcttgttcatttatttgtccagcaagaagaccattacttcaatctataagatcagcaaagagagaaataggagcaaagagaagaaagcaagctgctcagaaataaagaaagttaagggggaaaaacgatggaaaataagttgatagtatcatcttctcctcatgtgagaagtaatgaagatacttcatatataatgaaacaagttattatagcactccttccagcagcagtagcaggagtatacttctttagacttaatgctttgagtgctatgtttttttgtatacttggtacagtaggtactgaatttttatatcaaaaatttacgaagcaaaaaagtactataggagatttttcagctgttgtaacaggattattattagcatttaacgtaccagcatcacttccttggtggatgtgtctagtaggaggaatatttgcaatattagtagttaaaatggtatttggtggaattggatgtaactttgtcaatccagcacttgctgcaagagcatttttattagcatcattcccagtagcaatgactgcttggactcaaccaggtgttaactggataggtaaaaatttagatgcagttactacagcaactccattaagctttttgaaaaatggagcagcaggactggcagacctttctagcaatggaattagtcttgctgacatgatgatagggaatattggtggatgtataggtgagacatcagcaatattattattattaggtggagtatacctaatgtataaaggcataataaattatgttataccagtattttacatagcaactgtatttatattaacattccttttaggtggatttaatataactttcgcaatatatcaactgtttgctggaggacttatgttaggtggattcttcatgcttacggattatacaacttcgcctatgactaaaaaaggtcaaataatatacgctgtattagctggtcttataacaactgttataagaatgtatggtggatatccagaaggtgtatcttactcaatactattagtgaactgtcttgctccacttatagataagtttgttagaaatagagtatttggggaggtggctaaataatgaacagtatggtgagattaggtggtactttacttgctataagtgcaatagctgcattagctcttggagctactaatcaggttacagctccagtaatagaacaaagaaatatacaagaaaataatgaacttagaaaagcagtccttccagaagcaaaagaatttaaagaaatggataaaagtacatataaagaccttggagatggtcttatagctgaagtgtatgaaggtttagatggttctgaagtggttggatatactttaaaagctaaaccaagtggatatggtggagaaattgaagttatggtaggtatatcatctgaaggtcaagttacaggtgttgacattggtaatatgtcagaaacagcaggtcttggagcaaaagctaaggatgatgcatttaagggtcaatacaaaggaaaaactgctgagcctcttgaagtagcaaaaggaagtacaacagcagataatcaaatattagcaatatcaggtgcaactattacatctacagcagttactacaggagtaaatgctgctatagatgttttcaatagtgctcttaataaataaggagggttaattatgaatttagctaaagtatttaaaaatgggctaatagatgagaacccaacatttgttcaagttataggtatgtgtccaacactagccgttacaacttcagcaataaatggaattggtatgggtctttcaacagcagcagttttaatatgtgcaaatttagttatatctttaataagaaaaattacaccagataagataagaatacctatatttatagtagttatagctacatttgttacaatagtaggtatgcttttaaaagcatatgttcctgctcttgataaggctcttggtatatatataccattaatagttgttaactgtttaatattagctcgtgcagaaagttttgctttcaaaacaggagctatgccttcaatagttgatggtgtaggtcaaggtcttggatttactgttgcacttacaataataggtgcagtaagagaattacttggaaatggtagtttatttggaatgacattatttggagcatctttccaaccagtattaatatttatattaccaccaggtgcattcttaacattaggattcttatttgcaggatttaataaattaagaagtaaaaaagcatagtggaggtgtaataaatgaatttaatacttttatttttaagtatcgttcttgttaataacgttataacatctcaattcttgggtatatgtcctttcttgggagtttctaagaaggttgatacagcagtagggatgggagttgcggttacgttcgttttaactctagcttcaattataacttattttatacagattttattagtaaaaactggaactggattcttacaaacaatagcttttatattggttatagcttctatagttcagttcgttgaaatggtaattcaaaagatgagtccatctttatatcaagcattaggagtttatttacctcttataactacaaactgtgcagttcttggtatagctctagttaatgttcaaaaaagttataatttagtagaaacaataataaatggatttggagccggagctggatttactttagcaatagtaatattcgcaggtataagagaaagactagagttagctgatataccagaagcatttaaaggtttccctataacgcttatatcagcaggtttaatgtcaatagctttcttaggatttacaggacttataaagctataaaaaagaggggtgaaaatggtgatacttacagctgtattagttttaggaattatgggcttaatcttcgggatagtactagatttcgcatctaaaaagtttgctgtagaagtagacgagagagtggaagctatactaggagtacttccaggagccaactgtggaggttgtggatttccaggttgtggaggtcttgcaaatgcgatagttgaaggcaatgcaccagttaatggttgccctgtaggtggagcagatgttggtgcaaaagttggagaaataatgggaataagtgctgaagcaggtgagaaacaagtagcaaaagttatttgtaaaggaacttgttcaagtgcaaaagataaatatgagtatgaaggaatatcagattgtagagcagcaaatgttttaaactcaggtgctaagatgtgtaaatttggatgtttaggtcttggaacatgtaaggatgcttgtaaatttgatgctatttctatagttgatggaatagcagtaatagatgaagaaaagtgtgtaaattgtggaaaatgtaaagaagtttgtcctaagggtataataatcacaaaaccagaaagtcaagaagtagttgtagagtgtaatagcaaagagtttggtaaagctgttaaggaaaaatgtactgctggatgtattggctgtggaatgtgtgtaaaagcttgtaaatttgatgcaataatatttgaagacaaaatagctaagatagaccctaataagtgtgtagggtgtatgcaatgtgtagcaaaatgccctacaaaagtaatatcaggtgacataactaagaaaaagaaagttactattgaccaagaactttgtgttggatgtacagtgtgcaaaaaacaatgtaagtttgatgcaatagagggagaattaaaagaaaaacataaggtagatgcagataaatgtgtaggatgccatttatgtatggaaaaatgtccaaagaaagctattaaaattttgtaatatggacaaaataaggatatggaataatttccatatctctaatgagtacataaaacagaggtatggaataatttccatacctctattttatgtatatttattctaatggtaataaatataacaatagtgtaacaaaaaaggttcgacatttctgttgaattttttacaatatagtgatagactaaataggtacaaattacgtacaaatgaggtgaataaatgaatataatcttggcatcagcctctccaagaaggaaagaaattctagagaatacgaatgtaagatttgatataattaaaaatgaaattgatgagattatattggaaggtgaaacaccaaaacatttagttatgagattagcttttgaaaaaagtatgtctgtagcatctgaacataatgaagatgttgttattggagctgatacagttgttgttttagacaatgctattttaggaaaaccaaaagatgagtcttgtgcaagagatatgttaaaaagactatctggaagagagcatcaagtcataacaggtattagcttaataaacttgtgcgaagataaaaaggtaattgactatgtaatcagcaatgtgaaatttaaaacgttatcagagcaggatattgaggattatctgaaaactaatgagtcatttgacaaagcaggagcctatggtatacagggttatggagctttgttagttgaagaaattagaggagattattttaatatagttggtcttccaatttcaaggttaggcgacctattaaaaaaatattttagtataaatcttttttatggagtgtgatttatctgaaaaagtcatttaattcaaccattaaggtaaaagaaatggcaccagaggaaagacccagagaaaagatgcttgccaaaggcgtaaaaagcttatcaaatgctgagttgttggctatacttttaagaactggcaacaagaataaaaatgctattgaattagccaactatataataaatagagatattcagggtattagacatttagaagatatgacaatagaggagctgtgtaatatagatggaattgggttatcaaaatcaacccaaattaaagcagctttagaactaggctctagagtagctagttttaaacctataaagtataaaataaggaatccttgggatatacagaggtattatatggatagcctaaggtatttaaaaaaagaggtttttaaagcagttcttttaaacacaaaaaatgagataatatctgatgtagatgtatctatagggactttaagctcgtcattagtccatccaagagaggtttttaaagaagctataagaagaagtgcaagtaagataatagtgatgcataatcacccctcaggaagtgtagaaccatcaagagaagataaaaatatcacatcaagacttattaaatgtggagaaataattggaatagaaataatagaccatataattattggagatggattatactttagctttaaagaaaatatgataatttgactttatatgtgataaaataataggagaatgttttaaacatgattcttaatagtaggaaggagtaaaatcatggctaaggaaaaaaagaaagaaaaaaaaggtttttttagttttaataagatgacaaaggatatgggaatagatttagggactgcaaatacattagtttacataaaaggacaaggtattgttgttagagaaccatcagttgtcgcaataagagatgatagtaaagaggtattagcagtaggtgaagaagccaaaaaaatgataggtagaacaccaggaaatatagtagctataagacctatgaaagatggagtaatagctgattttgacataactcaatcaatgattagctattttatacaaaaagcggctgataaaaaaggtgttgtaagtccaagaatagctatatgtgttccttttggagttacagaagtagaaaagagagctatagaagaggctgcaagacaagctggagctaaagatgcattccttatagaagagccaatggcagcggctataggggctggattaaaagttgaagaaccagaaggtaatatggtagttgatattggtggaggtacttcagaaatagctgtaatatccttaggaggaatcgttactgctaaatctataagaataggtggagacgaatttgacgagtctatagtggcttatgtaaaaaaagaatataatcttatgataggtgaaagaactgctgaaaatgtaaaaattaacataggttctacatttaaagatgatgaagaaataaatatgcaaataagaggtagagatttaatctcaggattacctaaaacaatagaaatatgctctacagaagttagagaagcattaaaagaacctgtaagttcaatagtagatgcaataaaatctacactagaaagaactccaccagaattagcctcagatataatggaaaacggaataatgctaacaggaggaggcgctttgcttagaggtcttgataagcttattacacaggaaactggtatgtctgtacaaatagcagaaacacctcttgattgtgttgcacttggaacaggtaaatctgttgaagaccaagaaatctttgaaaaagtattaatgatgaatactaagaattagaagttggtgatggccttgagatttgacaagaacaaaaatgagaaaaaaaggattaatgttaaagtgatagcaacgggcgtagttgctatcactttaattggaattgtgggtatatcaattggtaaattttctagtggtagtccagtaaatttaggagtagcttcagatgctattacaagtgtaggtaagggaataaatgatggattttcttttatcaaaaatggttttaaagatgtagcaaattttaaagataattctaaaaaggtaaaaaaattggaagaagaaaatgaaaaacttaaaaaagatatgatagctttaaatgccaaactagataaaacagaatcgctagaagagttaaaaaagacactgaactttgtacaagaagagtataaggcgacaagtatttcagcaagtgttgttggtaaaaatgatggaaactggtatgagagttttgtcataggtgcaggaaaaaattcaggtgtaaaaaaagaaagtatagttatgaatggtagtgggttagttggcatagtttatgaagtttccaacaattatagtaaggcaatttcactattggattctaaggcatctgtaagctttaaactagcaaaggatgccaatgctaaaggtacaattactcaaaatactactttagataataaagatagttataatagtaaaggatatttgcaaggatatatgtttgactcatcatataatgtaattcaaggagatataataacaacatcaggtcttggattcttcccagatggtataccaattggcgaagttgaaaaggtggttgatgataaagataagtcattaaaatatgtagttgtaaaaccttatgttgattttaagaatataaatgacgttgtagtcatagaaccaagaaatataggataaaggggataaaaacaatgaaaaaagttttactttgtctgttggggattgtgcttatgactatagaaaatagtataacaaattatatagatatttttggcataagctttaatttagttcttatatatgtaaccataatctctctttatttagatgaattagaaggtgggattatagcagcaataatagggcttattaaagacataaccgttggtggaatttttggtgtaaatgcattaattttgtttattattgcatatgcaattggatacatgagagatcagctatataaaggtagttatattattactttcgttttaatttttataggcagtttaattgattcaattgtcaatataggtacatctagtataatttatcaaagctacaacatatcaacactttttgtaaaaggtctactagtagcaccaatagtgaatagtttaattggtttagtaatatatcgcttatctaaaagagcagttttaaaacttaaagaagattagttggtgatttcatggaagaaaataaacaagttgatagactaaaaataattaagatagtcatgagcgtgatatttttagctattttagtaaaaataatctatatgactacatttaaatatgaatattacaatgagttagctgagaataaaacatataaaaagttggcaatagaagctccaagaggagaaataaaagatagatatggaagactgttggcaggaaataaaaacttatttactgttcaagtttcaggtaacgatattaataagaaagatgcaaataagcattcaagagcaaatgaaatatcattaaaacttataaatttgctggagagaaatggtgaagaatatgtagatgagtttcctatatatgtagaaaatggaaagtactattatacatatgacagagatattagggaatataaatcagaaaatggtattccaaatgattataatgctaaggaaagtttttattacttagtagacaaacttatatcagctggaatattatctcaagaagataaaagattggatgcgacaagattacaggcaaaactaaatgaaaatggatattatccacctattttagttagtaaatggatgttcacagcagaaagagataagagagattggttggctagttataagataaaagaaactaaactgagtgccaaagaagcgtttgaaaaagtaagaaatagtgatgcattagaaattgataaaagtttgagtgatgaagatgcaagaaaaataatggtcgtaagggatttgataaaatcaaaaggatattctcaatataatccagtaactattgctaaggatgtaggagaaactacgattgctcaaattgaagaaagtgctatggaccttgttggtgtttcaatagcagtagaaccagtaagatattatcctaatgggtcattagcttctcatatgttaggatatgtaggaaaaatgccatccactcaaatagaatcataccttcaaaaaggttatgaaactggagatatggtaggtcttgcaggagtagaaaagagtaatgaaagtagattaagaggaactgatggttataaaatggttaaagttgatgcattgggtagaatcagtaaagaaattgaatctaaaaaacctaaatcaggagatactgtgtatcttacactagataaagatttacaagaagtttcagataatgcattaaaacagataatcgaagttgcttctaaaggaggtacttttaaaagtaaatttggggacaaaccaattagtgcatatgcaggaaaagcacagtcagcagctcttatagctattgatgttaaaaatggagaagtattagcttcatcaagttatcctaattatgacccaaataaatttgcaaaaggtatttctacagaggattataaagcacttcaaccaaaaaatccaaatgacttactagcaggaagtccacttttaaacttggttacacaaggggaatttcagccaggttcttcatttaagatggtaacttcaatggcagcattagaaaatggtttggatccaaactttactataaatgaccctggggttataatgttaggtaaaaaatcttttggtgactatgtatggaaccatggtagaggaaaccatggtatgacaaacttatataaagcgatacaagagtcttgtaatatatatatggcaacaattggtacaggtaaaacatggccagatggaaaaagcattggtatagatatgaatgcaaataaaatacttgagtatgcaaaattatttgggcttgaccaaaatacagggcttcaagatgaagtagaagaaagagcaggtaaagttcctagcacagaagataaattgaaatcaacacaagctcttctaaagtcaaatttagaaagagaaatggcaaatgattttgttgatataactagagaaaaaaatcctaaagaatatgagaaaagaatcaatgagattgtaagctgggcagcagaaaagaaaactcctggtagagtcgaaacaatgaataggctaaagaaaatgaatgttaaagaagatagaatagaagaagtagcagatttagcagtattcagttattttaactttgcaaaatggagtactgcagatacatttaacttagctataggtcaaggtgaaaatgcttatacaccagctcaaatatcaagatatgtagctgctatagcaaatggaggtaatttagtagaattatctgtagttgatagagctgtttcaagtgattattcatcagttaaaattaatgaccagaagaaagtcgaaaaaataccttttaaaaatccagataacttaaaagaattaacaaaaggtatgaaattggttgcaagacaaggtacagcgaagagtgcttttgctgattttccaatagatgtagcagcaaaaactggtacagctgagaaaagtgggaaaatacctacagataacgagtatgaatatttaaaaagtcatatgtcatcttataatgtcaacctaaatgatgcgattaaactagctgataagatgaaagcagaaaaagaaaaagagctttcattagctaaggaaaaggaaataaaaaagaaattagaaaataaagatttgaaagacgaagaaagaaagaaattagaggaagaattagaagatggagtaaaagttagattagaggacactgataaggtgaattcttcatatctaagaaaagctataaaagaattaaatccaaaaataacagatgaccaaatagatagatttaaacaagattatggttcttttacatggactgttgcttttgctccagcagatgacccagaaatagctgttgtatgtgtaattcctcaaggtgattcaagtgtattctcacttttaccaactagagaagttattggaacttatatgggattagagccaactaatagtaaaaatgacaacaagacgaatgatgttaacaattcttctgacgaaaatataaatttcgagtcacaaattaatagatagcttaatctatgtataaactttagctttatatagaaaaaataaaagggtttaaagcgtatttgaagaatataaatgatatatcactctggaggttgttatgtctttaagagaaatttgtagtcaagaactagtagagttcaagggtaataaaagagggataatagtaaatataaaaagagaagctccatttgaggaaatacaggaaaaaataataaacaaattggaagcatatgttggcttttttaatggggctaaaattagtaaaattaatagtgattgtttaactgacatggagattctagaacttaaagaaggaattacttctagatttgatgtggaatttgttgaagatcaaaaaattgaagaaaatagtaattttccaacaaaatatgtcaataccctaagatctggtgaaaatattgaatttgaaggtgatgtagttatattgaatgatatgaaacctggttcaaaagtcctttcaaaatcaaatacagttgttatgggagatataaatgctggtgctaaggttgtagcaggaggtaatgtttttgtaatgggtaaaatagaaggttttgtacatgcaggtgcagaaggcaatgaatttgcatatgttgttgctggaaatcttaatcctaaaatattacaaatagcagataatattgcagaagctccagatgatgaagaaaattatgaaaatgaatcagaaattagcccagaaatagcctttgtaagtaatggaagaattgtaatcgaaagctatttgtcaaagttagacaaatagaaagaaaaatagggggtagtattatgagcgaagttatagttataacatctggtaaaggtggggttggaaaaactactaccgcagcaaacttaggaactgcgctaagcctagaaaataaaaaaacagtagttgtggatgcagatattggacttagaaacttagatgtagtaatgggtcttgaaaatcgaatagtttatgacatagtagatgtagttgaaggaacttgtaggcttaagcaagctctaataaaagacaaaagatttgataatctatatttattaccagcagcacaaactagagataaaaatgctgtctcagttgagcagatgattgatctgtgtgagaaactaaaagaatctttcgagtatataataatagactgtccagcaggtattgagcaaggctttaaaaatgcagtagctggggcagatagagctattgtagttactaatccagaaatatcagcagtaagagatgctgatagaataataggtctattagaagcaaatgaaataaaagagataagattagttataaatagaattagaaatgatatggttaagcgtggagacatgatggataaacaagatataatagaaatattagcaatagatttgttaggtcttgttcctgatgatgaaagcataattatatcaacaaataaaggagagccagctatacttgattctaagtcacttgctggtcaagcatacaaaaatatcgcaaaaaggatactaaatgaagaagttcctctacttgatcttgaagttgaagatggattctttggtagacttaaaaaaatgtttagcatggctaagtagcaaaggaggatacatctgtgttagatttatttagagttttttctaacgaggctaaaactagtaaatctgttgctaaagagaggttaaagctagttttagttcatgatagagtagattgttcaccacaacttttagagatgataaaaacagacattttaaaagtaatagctaattatgcagaaatagaagatgatggtcttgaaataaaaatgtctaaatgcagaggtgagcatgatgacaaacctgtatctgcattagttgctaatataccactaaagaatataaaagatagatgtatgtaattagtgcttaaaagggggatatccttattggtatatgccccttttatttaattatatgtttaaagatagaaagacggtgattctttgaaaaaaatcaatattaattataagtcgacaattaagttgataaaacagttagactggaaacttatagttacagtattagctatctttatttttgggcttgttatacttagtagtgcaacacatgctaattcaacaggttcatataatcaattgattaaacaaggattagcttttgtacttggtataggaatgattatagtcatattattttttgactataatcttctaggcaggtattataaagcgctttatataataagtcttattttgttagccatagttttattacctggaattgggacagtaaaaggtggagctaggtcgtggattaacttaggaccacttgacttgcagacatctgaaatagtcaaattaacatttgtactaagttatgcaaagatacttgaatccaaaaaggataaattaaatacgttaaaggaagttatgcctgttgtagtttattctcttccatttatcggattattgattgcacaaccagacttgggaacaggaattgtattttgttgtatgatatttgcaatgctgttcacagcaggtcttagctcaaagttgataaaaagaggaataatcatactattagtgtcaatgccactgatgtatttaatgatggcagaccatcaaaaggtaagaatagaagcttttctaaatccagaagatgtaactctaaaaggaaactatcaagttatgcaatctctgattgcaattggttctgggggcgtaactggtaaaggactttacaatggaagtcaaaatcaagaagattttttacctgtacaagatagtgattttatatttgctgttgtaggtgaagaacttggtgtaataggaatggcagtgttgataatcttatttatgatattcctattaaggcttttagcaattgcaagagatgcaaaagatttttatggaaccctcatagtggttggtgttatgggaatgtttggttaccagataatccaaaatataggtatgacggttgcgttaataccagtaactggagtaacattaccttttgtaagttatggaggaagttcgttattgacatctttagcaaacttaggattagtactaaatgtgtgtatgagaagaaagaaaataaatttctaaatttaaatacatctaaacataaattgaggagattagatatatgaatatagcattagtagcacatgaccaaatgaaaaacactatggtcggattttgtataggttatgaatcaattttaaaaaagtatggactatatgcaactggaactacaggaaaaagaataatggatgaaactgaattaaatataaatagattagcatctggtcctttaggtggagaccaacaaataggttctttaatagtaacacaagaaatagatttagttatttttttaagagacccattgacatctcaggctcatgaaacagatatacaagcgttaataagactttgtgatgtttatcatgttccaatagctacaaatctagcttcagcagaaatatttataaaagctcttgatagaggagaactatcatggagagaagttagaaaaagcaaaagtcaacgtatttaaaaaatattaatattacagtctaaagaaacagatatataagtgtttaatgccctagtttttctgttgcaataaacctagtacctgtagaaatcttatgaaagatttaaatgatgaggagctaaatttgagattaaataattaggaaatagattatagatagagtagtagaatttaaactattactctattttaataatatgaaatagaattaagtctattattatatatatttaaacttataggtaatactatttcaaccaagtaaatgttgttacgacaacattaataaaacaaaaatttatttttaaaatttgataaatagctgtatattagtatttaatctataaatactaatatacagctatttattatttttaagtctattgtagaatataaaccttgtattatagagtactatgtattattatagtaaatataagtactatacattatagagtagtaggtgaaaaggcggtggtacataatgcagttaaataaagaagtgttaaaaggttatatcgatatattaattgtttctatattagaaaagaaagattgttatggatatgaaattgcaaagcaagtaagagaaagaagtgagtttgaattaaaagaaggaacaatgtatcttgcacttaaaagaatggaatctaaaaatttaattaaatcttattatagcaatgaacaaagttcaggtggaagaagaaaatattataatttaactaatgaaggtaaagattttttagaaataaagaaacaagaatggagatttattaaaaaggttatgaatcaatttttgggagaggtggattaatttatgaaactaatagatgaatatttagataaactatataaaaaatgtgacaataaaagtactatagaattaaaacaggaaatgagatgccatcttatagaatctgcaaatgaatttaaattagaaggattagatgaagaagaagcatgtaaaaaagcaattgaaagatttgatgatggtgatgaaatgcagtatgaattatgtaatataataaaagaactatctttatcattggataggcataaatcaattgtaatggggtttaaaaaagtattaggttacataagtataattgcatttttaatttctggatttatgtggtattacaataatagtttacaacataatatgtataatttaggaaaagaacttgatggagaaataaagcaattggcagaaagacatgatatgacaaatattggtgaatataagttagaacttgaaaaaatacttgataaagataagtatagtaaagtcaaagctcttagactatatgtaatagatatgaaagatggaaacactaatttaagttcttctggattgaatgctaatatggtatatgagagggaagcagattataataacataagtaattttatacagcatttaggatataatggaaaagattttttagacaagaatgggaatatagtaaatccagatattttcttagaatatttcttttattttgaatcggagatgttaattccagtagcatttgcatttggattattatgtataatagcgtattttatattaagatttaaaatttctttaataaaaaataataattaaataattcaccaaataattttaatttgtagagtaaataagatgtttcaaaataaaatttgaatcatcttattttttattgtttgttatactcttttcttttatatttctccatagtggattgtatctatacataatcacatattttgatataattataccttccaaaaaatgtattgaatatacaaattataatctgtataatgttgttaggggagaatgtatgaagtgtatacaattttaattttaaatgtattattgacaattctcctcactctcgtcattaccaataattagaaaattgacaaacctgttacagaccaacatttttgaatatattaattattatcattttattgtgatgatatcaaaaatgcaggtttgtgagttggattgtgtacgaactatataggaaatatagaacagattttccaagaaatctaaatattctatgaccacgtgaattgctatgcacacatgttgataatccatattttaaatctaaaatgaacttaattaatggtagggaattgaaagtaaaatatattataaaggagaatgctaatatgaaaaaaatcaggaaattagctactaaactattgattgcaacgatggttttaacctcatgtatgagtgtaacagtttatggtatgacagctaaagatgttactgcaaagacaccgaaaagctatgtagctggaaccaacagtatatatggtccaaagttatcacaagctcaacttaattcggtagcacaagcaacagcagactttatgaacaagaaaattacaaagaacatgaccacagatgctaagattagggttgcttataatcacattaaaaacaacacaacatatgttaactggaacgcagcagagggagccaatactgcttatacattggttactaaaaaaggtgcttgttctggaatgtgtaggagcttgaaagctttatgtgatgctatgggaattgaatgttattatgtacatagtacaacaaatgaccatcagtggaatcttattcgttttgaggatggacgtttgtatcatgtagatattgatgccaacaaatcagcaggagcagacatcatatacaagagtcttactcacccattaccatttgacaagaaagcctatccagctgttggtgaatcagtaaagacacagaatccaacgccaactgttaagaaacctacgccagctaagccttctgcgccagttggacctgggaatcacactatgatagcagatcaagaagaagcaatacttgatgaagtttatggaaataatctacgtcccaaaattgaaaggtatgagggagttccgtgtagtttaatcaactcatcaataaatacaattaagtttacaagcaaaaattcaaatttagacccatcaaggcatacagtttctgtaatagggtttatgaatacaccatatggtatggttgcattagctccagatggtgtacctgttgagtatccttttgaatatgataagccattttctttagattttactggtaaaaacctttctgcagcagaattatcaaaaaagtgtaaaaacaataatgtaattattaaaatagaaattggtgaaatagaacctaattctggaagagggcaagtaagatatgctagatatgtgaattaatataaatatacaagtatacaaatagaaaagattataaataatgtaccctcttggtgagggtgcatttatcattatattagtcattttgggaaataaaaaaggagttgaacttaaaattagattagaaaaattaattttgagacaactccattttaatttatttttaaatataaaatcatttattttaaataatattatgtgtgattaatggctatttaactaattttgcaaattctgcaccaaatgccatacactcttttaatgtctcttcactagggaagaattttttcttaagagattctacaggcattttgaatgacatagatttaagtaaagtctcagccatagttataccttcaccactccaaccaaatgaaccaaatactcctgctatcttgccttggttagccattgggtctataacagagaataaatcccacataggtttaaccatagttttgtttatagttggagaacctagtaatattacttttgacactactaatgtatcgtgcatttctgttaatgtcatatcttctaaatcatataattcagcctttgcaccttctttatcaagtccttcttttatctttttagccatctctaaagtattactataagctgataagtagaatatagaaacttgattttgattagttgtattaacagcttctgtagaccactcaacatatcttttaacagcagccattgggtctttagtaagcattggaccatgagaagtcaatatagtatcaaattctatgtttagtcctaccaccttatctacagcacttaaaacatgtttagcaaatggcttaactatacaatcatagtagtgtttagctgattttagataatcttcactattcactacctctgcatcaacacttgcaaagtgacaaccaaatgcatcacaagttaaaagagtcttgtcctcctcaatgtaagtaaacattgtatcaacccaatgtaagaatggagcagttataaatctaagatttcttttaccgatatttaaaatttcaccatcttttattacatgacagttaaaaggtctatttatttgaccatctaagtatagtttagcagctttagtacaataaacttctatattaggatttatatctaataagtattttaaactacctgcatggtctggttctgtgtgatgaattacaacatagtcaattttagctatatcagtaacctctgataaattacttaaaaactcatctttaaaatttgcctttacagtgtcaaataaaaccgttttttcgtccttgattaaataagagttgtaagttgtcccaaactcagtttccattattatgtcgaatacttttaaaccttcatctactacgccagtaaagtagatatctttttttacttcaaaaactttactcatttttaaccctcctaaaatttatcattatataagtaacatacccaattttgaggtgaatgaaacaaaagatgtcatgataagtcatgtaaaacaatagttttatgtttataatatatcatactttgtaaaaaaattgtatttcaataaaaatttaatagaaaatattcttaaatatttttagctattctattttgtgaataatatgtattttaaattcaatattttagttatatttttgatagaaaatattttatcgtgtataatactacttataaataagaataaaaataaagagcttgtttggaggaattttaataaatgaataaagtagacttgaaaaaaatcttaaaaaaagtagaaaagcctgctagatatcttggaaatgaaataaattcaattcataaagatactagtaatagtgaattgataagatatgcacattgctttccagatttatatgaagttggtatgagtcacttagggagtcatatattatatgatgtaataaataaggatgaagatgtattttgtgagagagtgtattctcctgcagttgatatggaaaatataatgagagaaaaaagtataccattatttgcattagagtcaagagagcctataacaaactttgattttgtcacttttacacttcaatatgaactttcatacactaatatcttaaatatattagatttagccaatataccaatattaaaagaagaaagaactttggaagacccatttataatggttggtggtccttgtgcttataattccgaaccattagcagattttatagatgtagtaatattaggtgaaggtgaagaggttaatttagaagtagtaaatgagtataaagaatggaagaaaaataaaacgactagagaagattttttatataaaatatctagcatagaaggagtatacataccaagtttttatgatgtcaagtacaatgaagatggtacagttcaaagtgtaactcctaatagagaagggattactaaaaatcctactaaaaggataataaaagatgttgagactgtagattatccagaaaaactaatagtaccttatatagatactgttcatgatagaatagtactagaattatttagaggatgtactagaggatgtagattctgtcaagcaggtatgatatacaggccaataagagaaaagagtgttaaaagacttaaagaaatattagataaattagttaagaatactggatatgatgaaatatcattatcatcacttagtacgagtgattatagtaagttatcagagttgactgattatttggtagatgaatatgcatctaataatattgggatttcgcttccatcccttagattagataatttttcaatggaaattgctgataaaatacaacaagtaagaaaatctggacttacttttgctccagaagcaggaactcaaagacttagagatgttataaataaaggtgttacagaagaagatttggaaaatgcaacagaaagagcttttgagatggggtggaatagtgttaagttgtattttatgattggtttaccaactgagacttatgaagatttagatggtatagctaaattagcttataaagttattgatatttatagaaaagtaaatggaggaaagctaaagagaagttttagtgttacagtgagtacttctacatttgtaccaaagccatttacacctttccaatggcatggtcaagatactacagaagaagttattaataagcagagacatttagtaaataaattaagaaataacaatataaaatacaattatcatgattcaaagactagtttgatggaagcagtagtagctagaggcgatagaagaataggaaaagttatatatgatgcatttagactaggtgctaaatttgatggatgggcagaacattttaatttagatatatggaaagaagctatggaaaagaataatctttctatagatttttatgcacatagaaatagaaactatgaagaggtatttccttgggaccatatagatgtaggtattagtaaaaaattcttaattagagaagacgaaaatgctaaaaaagaaaaaatcacttctgattgtagacataactgcaatggttgtggaataaatatacatgatataggaagggggctttgctaatatgagtaagataataagagtaaaatttaaaaaggaaggcgacatgatatatatatcacatcttgaccttcagagattgttacaaagagcgtttagaagagctgaaataaacttatcacattctcaaggatttaatcctcaccctaaaatgagttatggcaatgctttggctttagggacagaaagtcaaggtgagtatgtagatattgaaatagaagaagatgatttatcagtagaggaatttttaaataaagtatcaattcaacttccagatgggatagattttatcaaagcaaaagaaattgatagacaaacaccttctctttcttctgtgatagactatggagaatatttgtttaatatagatttgaaaagacctatgacgaaagagtttgtaaaaagaaaagtaattgactttatgaataataaagaaataatcataacaaaaaagaataaaaaaggtaagatggttgaagtagatataagacctatgataagaacctttgatgttttaaatttagaagatgaacatattactcttactgctactatagctacaggctcaaaaactaatttaaatactaatatacttataccaaagatattagagatgtttgaacttgatattgacccattagatgttgatatattgagaagagatttatatgtattagaagatggggaattagtgactcctatgtaagctcgagaggtgaagttgtgaaaaagatagttattgagtccctaatagggtcccagaaaacagcagtacttgaagatgaaagattaacagaactttttgttgaagacaatttaaataagaagactgtatccaatatatatcgtggaatcgtaaaaaaagttataccaggaatagaagcttgttttgtagatattggatttaagaaacttgcttatttacaattaaaaaagggaagtactataaaatctggtcaggatattttggttcagataaataaagaagaaataggaactaaaggcgcaaaattaaacactgagattagtatttctggaaggtatattgtctatataccttccaatgatagaactacaatatcaaataaaattactgatgaaaaagaacgatttagattaaaaaaaattactaaggcagtaaataaggaaaatctaggattaataataaggactgaggctcaaggttgcactcatgatgaaataaagaaagatatagaagagttgaaattaaagtatgaaaatattttaaaagaatataaacttggtataggtccgaaattattatataagtctttagattttgcaactaaatatgtaaaagataatgtgaatgatgatattgaatctataattaccaatagttatgataagtactctgaacttaagtctattttaagaggtatagataagacttatgttgataaactgtgtcttgaggaaaatagagatgtatttgatttatacagaatagaatctaaaatagaaaaattattaaataaaaaagtatggttaaagagtggaggttatttaataattgaaaaaacagaagctcttacggttatagatgtaaatacgggtaagtttattggaactggtaaacttgatgaaaccgtttataaaactaatcttgaagctgcaaaagaaattgtaagacagcttataattagagacatagctgggataataataatcgattttattgatatgcataaaaagaagcatcaaaaggagattttacacatcctagaagaagaatttaataaagataaaagaaaagctgaagtattaggtatgacaaaacttggtttagtagaagttgctaggcgtagagaaaaagaatccattgataagtattatttaatgtcttgtccatgttgtgatggtgaacaaacaataaaatctgtacattatatactagatagtattgaaaaagaaattatgagaataagtgaacatactgtttacaaaaacataatggtagaatttaatgattttatttttgaacaaataaaagaatattatatggatataattgataaaattggtgaaaaatataatataaagatttctttaaacgcaaatagtacattaaagcacaataaaaccaatgttattttcgataaaatagttgacaataaaatgtaaatattttataattaataattgtaatgccgcacagtaaaggtttaaatcttcaaatgaagtaccttgtactggcgagtttgaggccgaggaggtgtatttaatgtacgctatagtaaagactggtggaaagcaatataaagtttctgaaggtgatgtattattcgttgaaaaattagaagctaacgcaggtgatgttgttactttaaacgaagtattagcttgctctaaagatggagaattaaaattaggttctccagtagtagaaggagcatctgttcaagctaaagttgttgaacaaggtaaagctaagaaagttatagttttcaagtataaagcaaaaaaagattacagaagaaaacaaggacatcgtcaatcatacactaagatagttgtagaaaaaataaacgcttagttattggttaagttatgataaaagttaaatattattataatgatgatttcttgttgcaaggtttttgtttaaagggacatgctgattttgctgaaataggctatgatatagtatgtgctgcagttacatctaatgctattgcagttataaattctttagacaaattacaaaagattgaatttgaaaaagtagtaggagaagaaggtcatatagagtgtatagtcaaagatacgcatgtaaaagacgcacaattattactaaatcactttcaattagcggttaaagaaattaaacgggaatacccaaaaaatataaaaattttaaaaaagtagggggtgactccatatgttaaacatgaatttacaattattagcatctaaaaaaggggtaggttcttctaaaaatggtagagattctatatctaaaagattaggtgttaagagattcgatggtcaattagtaactgctggaagtataatagttagacaaagaggaactaaaatacatccaggaactaatgttggaaaaggtagtgatgatactttatttgcattagttgatggtactgttaaattcgaaagaaaagacaagaagagaaaaaaagttagtatatatccagtagcaatagctgagtaatatacataaaaggagtgttgaggcactcctttttcttataatactgatgaatttataatggtatttttggtaatgctaattaaaagtttttaattaagtaggtgaagaatttgtttatagataaggcaagaatatttgttaaggctggaaatggtggaaatggttcggtagcatttagaagagaaaaatacgttccagctggtggtccagacggtggagatggtggtcgtggagcaagcatcatatttgaagttgatttggggcttagaactctaatggactttaagtaccagaaaaaatatcaagctcaaaatggtggcgacggaagcaaaggaaaaagagctggtaaaaatggagaaaatttagtattaaaagtaccagcaggtacagtaataagagatgaggctacaggtcttgtattagcagatttaaaaaaagaaggagatacagctatagttgcaaaaggtggtataggtggtaaaggtaaccaacactttgcaaatgcagtaagacaagctccagcttttgcaaaatctggtacagatggagaagaaagatggataactcttgaacttaaaatgatagcagatgttggtcttttaggatttccaaatgtaggtaaatcaacatttctatcagttgtaactaaagctaaacccaaaattgcaaactatcattttacaacacttacaccaaatctaggtgttgttcaaactaagtttggagatagttttgtacttgcagatatacctggaattatagagggtgcttctgaaggcataggattaggtcatgagttcttaagacatgttgagagaacaaaggtattgatacatattgtagatatatctggattagagggaagagaccctattgaagattttgacaagataaatgatgagcttaaattgtacaatgaaaagctttcaaagaggccacaagttgtagttgcaaataaatttgatatattagaagatgagagtaagtttgagaagtttaagagtgaattagaaggcagaggatatacagtatttaaaatgtcagcagcaactcgtcaaggcatagatgaagtaatagcctatgtttctaaaatgctaaaagaagtagaagatgtggagctagtttcagaagaagaaatgtatagaccagaacttgatattggtactgaagaagagttaagtatagatattgaagatggtgtgtatgtagttacaggtaaagcacttagaagaataatgtattctgtaaattttgatgatatggaatcccttcaatatttccaaaaagctatggagagtcaaggtgtttttgataggcttagagaaatgggaatagaagatggagatgtggttaaaatttatgaattagaatttgagttttacaattaatttaaatatagattatagataatttaagtatagaattatagaggtgagaatatgttaaaaggaaaacaaagggcgtatttaagatctttagcaaatactttaaagcctactacacaaattggtaaagaaggtgttacagagagtttcttagagcaattagatggtatgttaagaactagagaattagtaaaagttactatattagaaaatgcaggtcttgatactaaagaaactgctaatgcagtatgtgaagctttaagagctgaatttgtgcaggctattggttttaaatttactatttacaagaggaatattgaagagcctaaaatactttttccaggacatgaacaggcgaaagcaaagactaaaaataataatgttacaaaaaagggtaaaccaactaaaagagctgttagataatagtttatatccttttagggaaataagttaaaaaaatagtgacaattggaagaaattgtattatactattaaacataaattttaattagcaatcttatcaagagtggcagagggactggccctgtgaagcccggcaaccagtatatttaattatacattggtgctaaatcctgcagcatttatgctgaaagatgagtataaacccgtcatatggcttgagtttatactcaagctttttttattggtatatttatatatataaataatttaatataatcaaaatgatgggggtatgttacagtgaagatagcaatattagggtatggaacagtaggaagtggattaattgatttaatagaaaataatacttcaaaaagagatatagaagttgttggaattttagttaaaaataaagaaaaacacaagtataagaagtattttgataagataactactgatatagaagatatatttgacaaggatattgatatactagttgaagtaattggaggattaaatccagcttttgattatgtaacaagagcgttaaataaaaaaatacatgtagtgacagctaataaagatttactggctgaaaaaggtagtgaccttatagaattagctaacttaaataatgttagcatcaagtttgaagcatctgtggcaggtggtattccagttttaaaaccattgatagaatcactggaaggcaacaatataaagagcataaacgctattttaaatgggacttgtaattttatattatcaaagatgtatgatgaaaatttaccatatgatgttgctttaaaacaggcacaagagttgggatttgcagaagttaatccagatgcagatgttttaggatatgatagtgctagaaagttatctatattgtctactttatcttatggaaaaatagtatattggaaagatttattattagaaggaataacttcaatagatgaaaaagatatagaatatgcaaaaaaattaaattgtaagataaaattggttgctagaagtaagtatgaatcaggagaagtaagtggatttgttagaccagcattagtggacaataataatatgctttcaaagatagataatgagttcaacgtagttattttagtaggtgattcagtaggtgaactttcttttgtaggtaagggagctggaagaggtgcaacaggaagtgctgtttatgcagatattatagatataatagataatagaagttcaaatataaagtctttttcaaaagggaaattggatttaagtggacttatagaagatgagtgtagtgcagtagttagatttggtgggtataataataaagatggaattttagaatgtttagataaatatgtagatagttatgatattatagatgatgaagaattggcgatttttgtaagtgcaaagtcagaacatgagattgatagagttttggaaattgtaaaaagaaataattacagtgaatcagctaaaaaattattgaagatagattaatatgtttatgcaagaattatgaaaatttaatagggtgtctcaaaatagagagacaagccttttttccagtattgaaataataaaaatatatttgattttataaaaaaagagtgtctcatgaactaaaaagttcattttgagacactcttttttaatatctggtgaattaataagataatagaaaaatgtatacgttataattaaccaataaagaaattttcactagcttcattaatagcttgctgagttactcttatatatcgctgtgtagtggctacagaactgtgatttaaaagttctttaaccaactctaaattattgttactcttttcaaattgagtagtagcatagagctttctaaagctatgtgtacttatattatacagatttaagtgtttacaaattatcctcaactgtttttgaatagcctttgtctttatatttactaagtagtcatttgatttaagattatactttcttgcatgttcatttatggactcaattatatttttattaactggtctatactgtaatttgcccgtctttttttcatttatttccaacatattacctttaaaattacctatctttaatcttaaaatatctgatattcttagacctaaattagcttctaacattagtgccaatgcaactttaggattttttctaaatcttttttcaacgccattttcactataagtaaagccagtatgtaatagttccattatctttttatattcgtctatttctataggtcttgttgccattttcaaccactcctcttagtttgatttggtaagtttaggtcggtatttattatataatataaatgaaacattatataatggaaaaatttcccagtaaacttatacaagtgtgatatatgtgattaaggagaattttttgaaaaatatttctaataaaattattaaattgtgatgaaataactatgctgttaaactaattaaaaaggttattaaaattatgacaaatataataaaaaaatggaagtatttagttaagttttattagttttatttttttcgtgaaaatttcttaataaaaaaagtatttttatatcgcattagtttcccatttgtagataaagttttcatatgtttttttgcaataaatactgctgagattagataaattattactacaatttgaagaattgtatcataatagctaagataataaaaccagattaaattattatatataacgttgtatgtatcagcaaagctagaaaccaacacagcagagtttgcaattggataaagtataaatataaagatagcagctaaaactccatgcgcaaatttacttagtatgtataattttaaatctatgtccgtttttgatagaaatgtacaacattgagctaggatggataatccactaaatcctatcaaaaagctagctaaagatgctcttaaaatttctggagaacttgttatactagatactttattgcatcctatagtaatttcaaatagaccacttacaaatgcttgacagagttctttactaacacctaaaaatgaaagaggcaaatatataactgatgctattaatgagattacattaaaaagagatagtattttaaatactactgaaaaaacaattacaaatccaccaactgtaagtaatgtatttactccattaaatacagcatttccaaataaaacaaaaaaaccattcccacttgaatttctaatgttgattacattttttatatttgtttttaaatccaattttgtctttggaagattttcattaccataatttctaaagaaaagaccaaccaatatagttcctagataatggcagagaatcattaaataacctaagtttgaattttggaacatacctgtaccaaccgaacctattatgaataaaggtcctgatgtagaacaaaaagacacaagtctttgtgcttcatgcttagaaatttgcccattactcctaaattcagaagctaaacttactcctactggataaccagatactgtagatatagcaaaagctaaagcgctctttcctgaaacattaaatacaaatctagttatgggattgatgataaaccctataatatccactatttttaaatcaacaattaagtttgctccaattataaatggtagtagtgatggaactaaaacattagaccatatagagaagccttctcttgcagattttatagcttcatttgggtataggataatccctaaaactagaactccaactataatagctggagcaaaaaaagcaataattttattttttttcataatatcacctgtaaatttgagttataagatattatattaaaagtaataaaaatatatgaatgtaatggtttaagatatataatagatatatattacaacaacgattatcatattggaggaaaaaatgtttaatagtatagctagtaaaaaagtttatgaacaagtaattgagcaaatacaatataaaatactaaatggagagttaaaaaagggggataaattactatcagaaagagaattgtctgaacaaatgaatgtgagtagaacttccataagggaagctattagggtattagagactatgggagtgatagaaagcagacagggtgaaggaaattttatatgtacaaatatagaaaaaactttaatagaacctttatctatgatttttaaacttaataatggcacacttgaagatatattagagcttagaataatcctagaaattgagattgcaaaacttgcttcaaagagaataacttcttctgaagttatagaattgaaacatataatagatgaaatgagagtagaaactaataaaaaagataataatcgagtactggtgttattagaccaaaaatttcacagtaaactagcaacattaagtaaaaattatttaattcaaagtctttttatgacagcatcaaaattatttgatggatttatagaagatgcaagagaaaaaataatcgcagaaccttttaatgaaaatatattgcttaaacagcatgaagctatatacaatgcagttgtagaaaatgatgtagaacttgcatgtgagaaagcaaaggaacatatggattttataagtaaaaattatagaaaaaatgaaaattaaaagtttgttataaaataaattattcttgcaaatggtagataatggtactatcatataaatgtgaaactggtatgaccacataccaattttatagtttattataatgggagattaaaaatggtaaagttaaaagtaccgtattcaaaacaaggaatgattttagaaatacctgatgaacgttttctcggtgttttggagtcaaaatcggataattatatagaacataagactcaagaagagatagttgaagaatctatgaataatcctataggctctaattctctggaagaactggttaaggggaaaaagaatgtagtcataattacaagtgaccatacaagacctgtaccaagtagaataactatgccaattatattaagaaggattaggaatgttaatccagaaattgatgtgaagattatagtggcaactggatttcataggccaagtacaagggaagagctaatttataaaatgggagaagaaatagtagataatgaagatatagttatgcatatatctactgatgataaatctatgtgtaaagtagggatattgccttcaggtggagatttatatataaacaaactagcatatgaggcagaacttttgatagcagaaggttttatagaacctcatttctttgcaggtttttcaggtggcagaaaaagcgtacttccaggaatcgcatctgcaaagactataatgtacaatcactgtagtgactttatagatagtgataattcaagaactgggaaattgaataataatcctattcatgaggatatggtatatgcagctaaagttgcaaagttagcattcatattgaatgttgtaatagataaagataaaaaaataattgcttcctttgctggtgatgtcgaaaaagcacatactaaaggatgtagatttgtaacagagttatcaaaagtaaattctataaaatctgatattgttgtaactacaaatggtggatatccactagaccaaaatatttatcaatctgttaaaggaatgacagcagctgaagctacttgtaaagacggtggagtaataataatgatttcagcatgtaatgatggtcatggaggtcaatctttttatgaaaatgtagcaaatgcagattctccaaaacaacttttagataaaattagaagtgtcgatagagtagatacgattccagaccaatgggaatttcagatactagcgagaatattatctaaatatactgtgataatggtaacagataagtgtaatcctgaaatgataaaaaaaatgcatatgaaacatgcatttaactttaaagaagctttagaaatggcgaatagtatagttggtaaggagagcaaagtagtagttatacctgatggagtatcagttatagttaaataaaaaaggagtgtactttatggaaattttgacatgtattaaacaagttcctggaacgacttcagtagaagttgatgaaactacaggagtactaaaaagagatggagtagattcaaaaatgaatccctatgacctatatgctttagaaacagctcttagaataaaggaagataagaaagcgaatctaaaagtacttagcatgggtcctcctcaggcaaagaaggtaattgaagaaagttttatgatgggagctgatgaaggagcattaataagtgataggagatttggaggagcagatgtattggctacttcctataccatatcacaaggtattaagaagatgggaaaggtagacctaataatttgtggaaaacaaactactgatggtgatacagcacaggtgggacctgaagtagctgaatttttagatatacctcatgttactaacgttacaaaattaattgaagttaaagatgaaagtatagttgttgaaatagatatgccaaatgatttacaagtatgtgagattgaatatccatgtttaataactgtagaaaaagacatttttcaaccaagactaccttcatttaaattaaaacttaatactaaagatagagaaatacctgtatatagcttagatgactttgaagataaagatgaaaataactatggacttaacggttctcctactcaagttgtaagaatatttcctccaaagccaaatacagataaaaatattgtaagaggaaatgcagatgaactaagttttgcacttgtaaataaattagaggaattaaagttggtgtaagggggagtaataaatgtcaaagatagttgtaaatcaagataaaataactgacttaaagagaattttagaaatatgtccttttggggctatagaagaaaagtcaggtatagtagaaataagtgctggctgtaagatgtgcaagttgtgtgtcaaaagtggaccaaaaggcgcatttgaatttatagagagtagtaaagtacaaattaataaagatgaatggaggggaattgcagtatatgttgaacatcataatggaaatatacatcctgtaacgtacgagcttataggtaaagctcgtgagatggcatcaaaaataaaacaacctgtgtattgtgtatttgtaggaaaagacataaaagataagtgcagtaatttgatttcttatggggtggatgaagtatttgtatatgatgaagatgaatttaaagattttaggatagaaccatattcaaaagcaatagaaaactttatagataaaataaaaccaacgatagtattagttggtggaactacattaggtaggtcattagctccaagacttgccgctagatttagaacaggtcttacagcagattgtacaatacttgatattcaatcaaatactgatttagaccaaataagaccagcatttggtggaaatataatggctcatataaacacacctaataatagaccacaatttgccactgtaagatataaaatattttcagcaccagaaaaaatagagaatactacaggaaagataactttatgtaaagtagaaaaaaaagaactaaaatctaaaattaaggtactgagtgtaaaagaaaaaaataaagaagttggtctggaagaagctgaagtgatagttgtggcaagcagagcaataaaaaaacaagaagatatggagatgatatataaattagctgataagctaaacgctcaagtggcaggaacaagacctgtaatagaagcaggttggatagatgctaaaaaacaaataggtcttagtggtagaactgtaaaacctaaattgataataacttgtggtgtatctggagcagttcaatttgttgcagggatgcagggtgctgactatatagtagcaataaataaagatgataaagcgcctatacttgatgtagcacatttagctttaataggtgatatttatgatattattcctaaattgattgaaaaaatagaaaataacaaagataataatcaaaaatatatggcatcagcagctaaatagggggatagaaatgtataaattaatcgataaaaaagatatagattttttaatagatacttgtggagaagaaaatgtattagttggaagtgatataaatgaagatttttcacatgatgaacttggagggattgagaagtaccctgaagttttagtaaatgtacttgaaactgaacaagtatctaaaataatgaaatacgcatataaaaataatataccagtcacaccaagaggtcaaggtactggtcttgtaggtgctgctgttgccataaatggtggaataatgattaatctatgtaaaatgaataaaatacttgaagttgattatgaaaatttaacattgacagtagaaccaggtgttttattgatgacaataggtcaatatgttcaagatagagatttattttacccacctgacccaggtgaaaaaagtgctacaattgcaggtaatataaacactaatgcaggtggtatgagagcagtaaaatatggcgttacaagggattatgtaagaggacttgaagttgtactaccaaatggagaaattataaatgtaggtggaaaggtggttaaaaatagttctggatatagtataaaggatttattagtaggttcagaaggtactttaggaatagttactaaagctatattaaaattgcttcctttaccaaagaaaagtataagtttgcttataccatttccagatttatcaatggcaatagaaactgttcctaaaataataaaatcaaaatcaataccaacggctatagaatttatggaaagagatgtaatattggcagcagaagaatttttaggtaaaaagtttccagataatacatcagatgcttatcttttacttacatttgatggaaatagcactgaagatatagaaaaggaatatgaaaaagtagctaatttatgtttagaaaatggtgcattagatgtatttatatcagatacacaagaaagaaacgattctatatggtcagccagaggtgcatttttagaagctataaaggcatctacgacacaaatggatgaatgtgatgtcgttgttccaagagataagatagcagagtttataagatacactcacgagcttcaagacaaattaaaaataagaataaaaagttttggtcatgcaggagatggaaatctacacatatatattttaaaagatggtatggatgataatacatggaaaataagattaaaagaaacttttgactatatgtataaaaaatctagagaacttagtggtcaagtttctggtgaacatggcataggatatgctaaaaaagagtacttacatgaatcaaattcagatgcttatatgatgttaattaaaaatataaagttagcttttgaccctaaaaatattttaaatccagggaaaatatattagaaatattaatttaataatatttacaaaacaaaaaatattaaattagatttaaatataatattttaaactttacttttaaatctgaagctaaattgtaaaatttttaggatggcaatatttacttaaatttagaaagtaacataatatttaagttgatgttgtcatcctaaaagcatgtgtacataaataaagtaagactattgtatcttatataataaagagttaataaaatgatttttataaatatagttattttaaaaaactactttacatatattggatgagtataaaaatccatagggccttttactaaatctttattgtttttataatatattgaattatatatatttgtagcttttatatcataacttatgagtgttttaaaaatcgtatcatctaatgaaaatgatatatttgaaaacttgtttattatttttatttcagatttattttttatctcttttagaatttctctacctttatcattaaaagcaagtattcttatataaggtatagtatctatgttttttataagttgcatgtcgctttttttaatacctaacaatatattgtttagagttcgtttgattttggttaaagtgtatcgcttggatttaattgctaattgtagctcatgtagaaattcagatgtaaagatatctttatagattctgttttctatgccttcatttacttcaaaatactcttttaaagtgtccatatctctaagtataattgtttttaaaatatcaaagaagaagtcatcaaacataggtaaaaaaccattatctactttttcatttaggatgttataagttttttctggaataacattttttaaatgaaaaaggtctgtattttctttaagtgaagtccttatagcagtagcagaacaaatatcactctcaatttcttcggaattatattctgattggaccctggagatagtaaatggttttatactactgtttaaatggatgaggttttttatgtattctatacccagtatgttgtttgatgaatttaatgtttttgataattgttcctttgaataattttgtataaaattattttttttgtcttgatgtatataatcaaaaagtgcattagctctagctgttggaaataacaggccatcatctaaatatttttttaaaagtaacttaaattcatttggttcatttgctaaaatttcagctatattataaagaatttctgtatttccttcttcactaccaaaacatatagaatttatgcagtttagtgaatttaaaattgttatagcaccatgagaaaaaatttcagcactttgacaagcaaataaagttggtaattctataactaagtctacaccattttcgacagcaatttttgctctagtatatttatcaaataaagctggttcgcctctttgtagaaaatttccactcattattgctacagtatgtgttgcatttgttttttctatagatttagataaatgatatatgtgtccattatgaaatgggttatattcaactattaatccaagtatgttcataaaatactccttttatctttaattattttatatatatcacaatttattataatatgtataaaatttaaatttttaattataaaattaaaaaacgtaaaaaaatttataaaaatgtagaaatgttacctacataaaaaactggttaaatgttattaaaataactttattagctctttatattatattattataacaaatgggaaagaataatctacattaagttaacttgttaatatattattagtgaaatacacaatttaccatactagaaatatgatataatataaaaaaaaagtatatacttttatattaaaaggtgatatattatttatgaaaatcgtttaatgtatacaataatatatctataacaaaataataaaagatagagttttatttagacatttattacaaatcaaaatttattacatattatttataaaaaaatctaaggaggaaataataatgaaaatattagtattaaactgtgggagttcttcattaaaatatcaattaatagatatgaataatgaagaagttttatgtataggattggttgaaagaataggaatagaaggttctatattaaaacatgaaaaagcaggtagagatgataaatacgttgttgaacaaccaatgaaggaccacaaagatgcaatagcattagttttagaagctgttgctcatccagaatttggtgcagttaaagaaatgaaagaaatagatgcagtaggacatagagttgtacatgctggagaaaaatttgcaacttcagtagtaataactccagaagtagaagaagctttaaaagaatgtatagatttagctccacttcataatccagcaaacataatgggaatagatgcttgtaaagctatacttccagatgtaccaatggtaggtgtatttgatactgctttccatcaaacaatgcctaaatcttcatacttatatggtttacctcatgagctatatactaaatatggggtaagaagatatggattccacggaacttctcataattatgtatctcagagagcagcagagatattaggaaaagatataaaagatttaaaaatagtaacttgtcacttaggaaatggtgcttctatagctgctgttgatggtggaaaatgtgtagatacatctatgggattcactccattagaaggattaataatgggaactagatgtggagatatagacccagctatattaccattcttaatgagaaaagaaggtttagatgctgatggattggataaattaatgaataaagaatctggagtatatggaatgactggaatttctagtgacttcagagatatagaagatgcagctaaaaatggagacgaaagagctcaggctacattagaagcgtatgttaaaaaagtacaaaaatatataggcgcttatgctgctgaaatgaatggattggatgttgtagtatttactgcaggcgttggtgaaaatggaaaggctataagagcagatattgcttctaacatggagtttttaggaatgaaattagataaagaagctaatgatgttagaggaaaagaaacagtaatatctactgctgattctaaagtaaaaatgcttttaataccaactaatgaagaattaatgatagctagagatacattaagattggtaaaataattaaattaaacctatgcctatcaagtaaaaatacttgacaaacaaatgctagatttgtataataaatttggtgatatgttgaggtgaacttaatgaaagttagcatagaaaaaataaatagaaaagaaactgacaaaatagacttgaatttttgtgaaaaaattgatactattagttattgtgatgagatttacaaattagtatcacctgtaaatttaaaagggaaagtgtcaaagactaataaaggtttgtatctagatatagatgtcaattttacaattgttgacaattgttcaagatgtcttaaagaagtagaaataccactagagtattctatacaaggttttttagtaaaagaagaagattatgatgaagatgagtttgaggaatttgatccttttatattcgatggtgaagaaatcgaccttattgatataatagaacagacattagattttaatgtacctcataaagttctttgtagtgaaaactgtaaaggtctttgtcaagtatgcggggcaaacttaaatgaagaagagtgttcttgcagtgaaattacaaacgatgaggaatacatagatcctcgttttgctaaattaaaagatttatttaattaaattttgactaaggaggtggcgtaaatggcagtaccaaagcgtaaaacgtctaaatcaaacacaaaaatgagaagagcagctaactcaaagatggaagcaacaggatttgtaagttgcccacaatgtcatgagccaaaattaccacatagagtgtgtccagactgtggatattataaaggtaaagaagttgtgtctaagtaatagcttctaaaaagcatgtagagtatactctacatgttttttttgtacatataaaaaaataagatgatttactagagaaaataagtggattttatgcatattaaaaaatagaaaaataataatataagtattgaaaatttttgtgtgttactatatactactattagtagctggtactaattacagctataaaatttggagggaacatgaaaaagaaaagtaaagcccaaagacaaaaagagcttatagatatgctaaagacagatcctttttatactgatgaagaattatcaagtctgtttgatgtaagtatacagaccataagattagatagaatgagtctaaacataccagagctaagagaaagagtcaaatcaatagcagaaactcagagttcaaaagtaaagactttaggagtaaaggaaattacaggagaaatcattgatttatctgtagggcgattaggtatatctatgttagaagttacacaggacatgatttactctaagactaatactttaaaagatacgtatattttttctctagcagattcattggcaatggctataatagatgcacctaaggttattatgagagttgcaaatgtaaaaagttttaagttgatagaacaacaagatagacttatagcaaaagcagaagtgtatagaaatatagataaaaagcattatgtaaaagttgttatcaacaataaagcccaagagcaaatatttagaggaaagtttatctttgaagaattagattaggagggaaattatgaaaatagtaattgatggaatgggtggagataatgcacctaaatctaatgtagaaggcgcagtaaatgctataaaagaatatcaggttgatttaataatcacaggagataaagatttacttgaaaaggaattttcaaattatgaatttgatagaaataaattagagatagttcatactactgagattatagaaaacgaagataaaccagtaaaggctataagaagtaaaaaagattcatctatggtagtagcattaaatcttgtaaaagaaggaaaggcagatgctataatatcagctggaaatacaggagccttacttgctggtggattatttgttgttggtagaataaaaggaatcgatagaccttgcttatgttcagcaataccaaatgtaaagcgaggaatgacacttatagcagactgtggcgcaaatgcagattgtaaacctaagaatctagttgaatttgcagctatgagtaatatttattcaagaaaagttttaggtcttgaaaatcctaaggtagcattagcaaatgttggactagaagaaggcaaaggcaatgatttagtcaaaaggtcatatgaagaaattaaaaaattagatttaaattttatagggaatgtagaagctagagaagttataaatgcatacacagatataatcatatgtgatggatttacaggtaatatattacttaaatctgctgaaggtgtagcactttcagttatgagtcttataaaggaaacttttatggccagtacaaaaagtaaaataggagcattacttataaaggatgatttaagaaaattaaaaagttttatagattattctgagtatgggggagctccacttttaggtctaaatggaggagttataaaagctcatggtagttctgatgctaaagctataaaaaatgctataaatcaaggaataaaattttcaaagggaaaagtcgttgaagatattaaccaatttataagcaaatacaatgaagaaaataaaaataacgaagatgaataaactcgttttggaggtttaatatataatgaatacaaaggctggaatattaggagtaggaagttatctacctgagcaatcatatgataattttcacttcgaaaaaataatggatacatcagatgagtggataagtactagaactggtattaaggaaagaagatttgccaaagagtctgaagcaacttctgacttagcatctaaagctgccttaaaagctatagaatgtgcaaagttaaacgtagaggatatagagctgattatattagctacaattactcctgatatgtctttgccttcaactgcatgtatagtacaagatgcaataggagcagtgaatgctactgcatttgatatatcagcagcttgttctggatttgtatatggagtaactattgcaaagcaatttgtggaaacaggttgctataaaaatgtgcttgtaataggagcagaaacttgttctaagtttttaaattatgatgatagaacaacagcagtattgtttggagatggagctggagcagctgttattggtcctgtaaatgagggtggaatactgtctacacatatgggctctgatggtaaaggaaaagattgtttaaaagtacctgctggaggttcaagacttaaggcaagtaaagagactgtagaagctaatctacatacaatagaaatggcaggtagtgatgtgtttaaatttgcagttagaaagatggcagaaacttctttaagagctcttgaaaaagcaaacctaaatacaactgatatagactacttagtgccacatcaagctaatataagaatcatacaagcttcttctaagagattagagcttgatatgaaaaaagtttatgtaaatatagacaaatatggaaatatgtctgctgcatctataccagtagcattagatgaagcttatagagaaggtaaaattaaaaagggtgataatgtagttttagttggctttggtggaggtctaacttggggggcttcagttgtcaagtggactttatagtataaaatatctaaaatgatttaattaacaaaattaaacttatacacaaaataaagttgattaataataaaaagtttacttttatgatttcaagtgaaggagaattgtatgaataaaatttgcaaaatattaaatataaaatacccagttatccaagggggaatggcatgggtagctactgcatcattagcaagtgctgtatctaatgcaggaggacttggcataatagcagcaggaaacgcaccaaaagaagctataaagaaagaaattgttgagtgtaaaaaattaacagataaaccttttggagtaaatgtaatgcttatgtcgccatttgttgatgatataattgatttgattatagaagaaaaagttcaagttattactactggtgctggaaatcctgcaaaatatatggatagattaaaggaagctggaacaaaggttattcctgtagtacctacaatagctttggcacaaagaatggaaaagttaggagctacagcagtaatagcagaaggtactgaaggtggaggacatataggagaacttactactatggtcttagttccacaagttgctgatgctgtaaacatacctgtaatagctgctggaggaattgtagatggtagaggaattgcagcatcatttgcattaggtgccagtgcagttcaagtaggaactagatttatttgcagtgaagagtgttctgtgcattcaaactataaaaacttagtactaaaagcaaaagatagagatgcaattgtaacaggaagaagtactggtcatccagtaagaacattaaaaaataaactatcaaaagaatttttaaagatggaacaaaatggagctactcctgaagaattggataaaaaaggtacaggagctttaagatttgcaacagtagatggagacatagaaaaaggttcatttatggcaggtcaaagtgctgctatggtaaaagaaataacaccttgtaaggaaattatagaggctatggtaaatcaagcaagagagattatgccagcaatagaactgtaaatcaggaggagcaagatgggaaaagttgcactagtattccctggtcaaggagctcaatatgtaggtatggccaaggatttatatgaaaataatgctgttgctaaaagtgtaatagatgaggctagtgatgccttaaatatggatttaaaaaaccttatgtttaatggaaatgaagaagaactttctaaaactgaaaacactcaacctgctatggttacacatagtgtagcagtattaaaagcggtacaagctcaaatagatttaaaatataatgcatgcttaggattatccttaggagagtatagtgcgttggttgcagcagatgcaattgactttaaagatgctgtatgtttagttaaaaaaagaggtaagtttatgcaggaaacagttccagcaggtgttggagctatggcagcaattttaggtttagatagaaatgtacttgaaaatgtggttaaagatatacaaggaggtattgtagaagtagcaaattacaattctcctggacaaatagttatatctggtgaaaatgaaaagatagaagaagcaatggtaaaatgcaaagaagcaggagcaaaaagggcagttaaattaaatgtaagtggaccttttcactcatcaatgttaaaagaagctggtgtaaaattggccagtgaattagaaaaagttaacataactaaacctaaagttgatgtggtggcaaatgtaaatgcagattactataaaaacgaaggtaaagacctgcttataaaacaagtaagttcatctgttctttgggaagattctatagaaatacttttaaatgatggatatgatacttttatagaaatgggacctggaaaaactttaaaagcatttattaagaagatagcttccaataaaaaagcaaatgtcaatatttataatatagatggtatagattctcttaatgaatttgtacaaaattatagaaatggagagatataatgataaatcttacaggacaagtagcagttgttactggtggctctaggggtataggaaaagaaatagcaaaaaaactagcatcttttggagctgatgtagtaatcaattatacttctaaagaagatgaagcactaaaaactaaaaatgaaatagaaagtatgggggtaaagtgtacctctataaaatgtgatgtgtctaaatttgatgaagtgaatcaaatgatagattctgttgtaagcgaatttggaaaaattgatatattggttaataatgcaggcataactaaagatggtctgcttatgagaatgaaagaagaagattttgatagagttatagatataaacttaaaaggtgtctttaattgtacaaaagcagttactaaacctatgatgaaaaagaagtatggaagaataataaatatgacttcagtagttggaattatgggtaatgcagggcaaactaattattgtgcatcaaaagcaggtgtaattggatttacaaaagcttctgcaagagagttagcatcaagaaacataaatataaatgcagtagcacctggatttatagaaacagatatgactagagtactaagtgatgatgtaaaagaatcaacactagcaaacataccaaagaaatcttatggtaaaccagaagatgtagccaatgccgtagcatttttagttagtgacatgtcaagttatataacaggacaagtaataaatgtagatggtggaatggtaatgcaataataatttaaaaagtagagaaatctattaaaataaaaaattttaggaggtacacaatgtttaataaagttgtagaaataataatagagcaattaggagtagaagataaagaaataactatggagacatcattaatgaaggatttagaagcagattcattagatgcagtagaaataataatggcacttgaagatgaatttggtatagaaataccagatacagaagcagaaaacttcaaatctataggagatatagttaagtatatagaagctaataaatagtcgagctttaaaaaagtggaggtatccgatgaataaaagagtagtaataacaggacttggatgtgttacgccgttgggaacgggaaaagaagagttctggagtaatataaaatctggagtatctggtatagataaaataactaattttgatgctagcacatatcaaactcagatagcaggagaagttaagaattttcatccagaagaatatataagtaaaaaagaattgaagagattagataaatttgctcaatttgcaatagtatctgctaaattagcagttgaagatgcaaatcttgatttagataaagttgatagagaacgttttggtgttataataggttctggaataggtggagttgaagctatagaaactcaacataaaattcttttggaaaaaggaaataaaagagtaagttcactttttgtacctatgatgataggaaatatggcagctggtcaagtttcaatatttttaggagcaaaagggcctaacactaatgtatgtacagcttgtgcatcaggaactcattcaataggtgatgcttttaaggtaattcaaagaggtgatgcagacatcatggtagcagggggctctgaagctgctgtaacaggtcttgcttttgctggattctgtaacatgaaggctatgtcaactagaaatgatgaccctaaaactgcatcaagaccgtttgataaagacagagatggttttgtaatgggagaaggagcaggtattgttatcttagaagacttagaacatgctttagcaagaggggctaaaatatatgcagaagtagttggatatggtttaactgctgatgcataccatatgacaactccagctgaaaatggagagggagcagctaggtctatgaatatggctttgaaagatggaaatgttccattagaagaagtagattatataaatgctcatggaacttcaacttattacaatgatttatatgaaactatggctataaaaactgtatttggagaaaaggcatatgacttatgtgtgtcatcaacaaaatctatgactggtcacttattaggagcatcaggtgctatagaggctgttgtttgtgctatgagtatagaagatagttttgtgcctccaactataaacatacaagaagttggtgaagatttggatttagattatgttccaaatcaaggtaaagaaaaaaatattagatatgcactatcaaattctttaggatttggtgggcataatgctacaatagtactaaaaaaatatgtataaataaatattaaatataaaactaaaaaacaagcacttgttttaactgtataaatttatattagcttaaatttaaagtctcctaaattattttaggagacttttttattaagatttaagtctagcatatgttgtaaatcattttgatatattgtattattaattattaagaggttatttatatatgcaagttttcattctacaatatacaaaaggaggactaaaattttgaattttagactaccaaagaaaaggttacccaaaaagataatttttatatgtataatacttattagtattattttgtttataaagtatgaccaaaatggattgaaagaaagagaaattataaataagggaaaatatatgtctgaaagccttgtggcagataaggagtatgatgaagcaaaaaaagtggttaagacttctttcgaatctattccagaaaaaaaatacaataaagtatataatgaagtttgggatatgttaaagactatttcatatgttccagatggaacgaagatagtcattgattctttagaaaagatgagagaatcagatgtgaaattatctgatgaatgtagatttaatatagaaaaaagattagcatcagtgtatataatggataataattattctaaggcagtagatttaactgtaaagtctataaaattggctgagaaattggggaataattatgaaaaagcaagactagatgttgatttggcgagcatatttttaaatataggtagctatgaaacaggagagaaattaataaaggattcttttaaaatagatattgatgaaggtgaaaaaaatggaatggttagattatatgctattataaatctagcagaaatatatgtagaagagggagaatatgataaagctattgaaataagtagcaggataaaagattataaaaagtttgtaaatacggataattacaatgattttgatataatggcctctataatgaagtcaaatgcgtatgtgggcaaaaataatatacaaaaggcaaagacttttttagaaaaagctgattatcttataaaatcagatagaacagtttatatattagataaagatatgtactattatatggcaatgggaaacttagaatataaaagcgaaaattataattctgcaatagataattataaaaaaagtttagagatatctaccaaaagaaagttaactcaggagaaaataaaaaatttaaataagatattaaatatatatgaaaaacaaggaaatatagaatctttaaatgagtatcaaaagatgttaataaatgaatataaagagaacaaaagtataagagattcagagactagtttctatataattgataaagtatcaaacgaaagtaagctatttgaaaaaactaaaaaagaaataaaatattataaaatattatttacagtaattttaattgctatattagggtctacttttttatacaaccgattgaagtattttaaagcacaaaatttacatgatggtcttacaaatgtttataatagaaaaagttttgatattatgtatgaaaagtacagagagaaagatgataattttgcacttgtgatgatagatattgataatttcaagctcataaatgataattatggacataaatttggtgacactgttataaagggaataacaaataccatttgtgttatgttagaacaagatgataaagtctttaggtacggaggagaagaattttctgtattaataagaaataaatctggtgaggaagtagcagatataattgacaatataagggttgcaattgcaaataaaaagtggaatgatgatgtgactgtgactataagtgcaggtgtagctcatatttcagatagcaaagatgtactagaagaagctgataaaaatttatataaagcaaaacaacttggtagaaataaagtagtatataagtaattatatactatataaataagaggtataaatatgaaacaatcaatagctatagtaactgataaaataactaaactatcatctttcttagaagaaaatatacgtttggttttaggtaattatattgatataaaccactattatctggaagttttaaaagagaatgataaaatacaaggtgattttgtactagtaatgaatgatgatagattaaacagtatgagaaagcatttagtacaagatagtaagattatagtgataaggagaacacttaaagaaaatgaaatatatggattattttcaataccaaatggaactgaagtattggttgtaaatgatacaaaagaaactaccttagaaacgataagcttattttacaaaataggagtaaaaaatttaaagtttactccatatattgaaggaaaaatttataaaaatatagacatagctataacgcctggagtaaaggaaaaagtaccaagttatataaataaagtaatcgaccttggtaatagatatattgatatatctacttttatagaaataataaatggtcttagaattgatgttaaagaaatacgtaaaaatttaatggcatattctgagagtttaataagtttagataatggagttaaagataattataggcaactgtttttaaaaatagaagaacaagatgttatattgaatctatcaaaagatggaataatatttacttcagcagatggtataataaacacatttaataaagaagctttaaaaattttaggtataaatgaaaatccacaaggcaaaaacatagaagatatcatttctgaagatttaaatattttacttgaagacaaagaaataattgatgaagtggtatttacaaataaaaaatatataaatgtaaataaaaaaagtattttttctatggggaataaagctgggatatattataacttacaagaaataacgtatataaaaaaattagaacaaaatcttactaataaattaagagaacaaggtcagatagcaagatatacatttaaagatataaaaactaaaaataaaaatatggtaaagtgtgtagaattggctaaaaaaatatctaaatcagacctttctgtattaataataggagaaagtggtactggtaaagaattattatcacaatcaattcataatgcttccaatagaagtaatcaaccatttatagcggttaattgtgcagcagttccagatagtctattagaaagtcaactgtttggatatgaaaaaggctcttttacaggagctttaagagaaggaaaaaagggtctatttgaacttgctaataatggaactatatttctggatgaaattggagatatgcctccattgctacagacaaagttactaagggtattacaagaaaagcaggttatgcctataggttcccataatgttataaacatagatgttagggtcatagcagcaacaaacaaaaacttactaaagatgattagagaaggaaaatttagagaggacctgtattatagactaaatgtattgccaatagatgtaccatcattgaggaatagaaaagaagatataataacacttatgaatttctttttgaaaaacaatgtaagactttcgccagaagttataactattttagaaaaatataattggccaggaaatataagagagttacaaaatgttgcttcttatgtaagtctaatgtgtgatagtatggtttttagagatgacttaccaccatatataagggtagaatgtgctaacaattatgaagatggatttggttatacaaaaaaagaatttgaggaaatactgaggattctatatgaaagaagagagtcatcctctggagttggaagagggtttataatcgaaaagcttatacaggaagggattgagatttctgaaagcaaagttagaaaggtgctatcttatttaagtgaatgtggatatatatcatctaaatctggtagaggaggaagtcaaataacctcagaggggataaaactttataataatataaattaagctaagtatttgatattgaaatcacatattttgaatttagatatttaaataataaacttttatatttatagagattaatttatactatgtcagaaagaatattgtaatttataattaaatattaataggtttttaaaataggattagataggtaataggttaagttagaataacccattacctatttttatttgtaagaaaagtgtacatagagttaaaagtaaaaaatacaactaataaaactattgaaaacactagataaataataaataaaaataattataaattttggcatatatattgctaatcatagagataagacgacaaaataattgggaggtttaatgatgaaatacaaaacaacagggacttgtgctacagaaattgaatttgaagtaaaagaaaataaagttacaaatgtaaactttataggtggatgtgatggaaatttaaaagggctaaaagtattagttgaaggcatgaatatagaagatgtaatacaaaagttaaaaggaatagagtgtaaaacaaagccaacatcttgcccagaccaactgtctctagcattggaaaattatatgaatataaagtaatacataaaacaatcgattagttaggagtttaattatgaaaccaataatagggattttaggaaatttaataataatggaaaatggtatgtttccaggtcttgaaaggtcatatgtaaataatgattatataaatgcagtgctaaaaggtggcggtagtccagtaataattcctgtaaatacagataaagaagttataaaaaaacagattgaaatggttgatggagtcttaatatctgggggatgggatatcaatcctcaactgtatggagaagaaacaagagaagaaacgacatttatatatccagaagtggatgaatttgatttaattgcaataagtatagcattagaacttaaaaagcctatattaggtgtatgtaggggactacaaattttaaatgtaagtttaggaggaactttatatcaagataataatcttatagaaggaagttatataaaacatacacaatcttctaaaagacatgtagctactcataaagtcgatgttaaagaaggaagtattttagagggaattttaggaaaacaattacttacaaatagttatcatcatcaaagtgtcaatcagcttggaaaaggattaaaagccatagcatactcaaaagatggtataatagaagctattgagaaagaggaggaaaattttgtagtaggagtacagtggcatccagaaatgatggtagattactgtgataaaatggaaaaactatttaaatattttataaatatttgttcaaatttataatataccttggggggattgaacatgaacgaaaagaacaaaatgggattaataagtattatacttttaggtattaatgcagtagtaggagctggagtttttctattaccaggagatgcaatgaaatcatttggtgtagcaagtatatttgtatatatatttgatatgttgttagttttatctatggcattctgttttgctgaggttgcaggtaaattcaataaaaatggcgctgcctatgtatataccaaagaagcttttggagatttttgtggttttgaagtaggtcttatgaaatgggtaataggatgtatttcttggggagctttaatagtaggttttcctacatcattatcagcagtatgggctccagcaggtgaaccacatatacaaaaaattataattgtagccatgatagttgggcttacaattataaacttattaggtgtatctctatcaaaaattgtacaaaatgttataactgtaggtaaactaattccattaatactatttataggaataggtatattttttataaaaggagttaattttacttcttcaacaatggtacctccaggagctggagcaacagagtttggagcagcagcacttttaatgttttattcatttacaggatttgaatctatagcagttgcagcagaagatatggaaaatccacaaaaaaatataccaatagcaattataagtgtaatagtaattgcatcaataatatatatattaaatcaagttgtatgtgttggtatactaggagattcgttatctagtacatctacaccagtggcagatgctgcaagaatatgctttggaaatatgggagctggattggttacctttggaacattggtttctgttggtggaatttgtatgtgtggtgcttttgtaaatccaagaagttgtgtagctttagctgatgataaaatgttaccaagaatatttgcaagaaaagataaaaaaggtacaccatatgtagcgataatagctactatgttaatcactataccaatagctctatctggaagttttgctgaattagcagcaataagtgcagttgctagattcatacaatacataccaacatctttatccgtattagtgtttagaaagaaaagaccagaattagtaggtacttttaaaactccttttggagcagtgattcctctaattgctgtatgtgttggaacatggttgttattccaagcatctatgcatcaattaattatgggattaggagctttggcaattggagtaccattatactttataatgaagtcttataatagaaaagtctgtggtgaaaatttaaagaaaatagtttaattatgttataagaatttattgagttaaaattagacattggcagaaaattaaatacaaataagtatctataaggctatattaaaatattattaattttttattttaatatagccttatattgttatcaataaatgaaaaatattgtaacaacagaagaacaatagtattatgtttatagataaaaaacttattaggaggtaaatttatgccaacaataacattaaaaaatggtgtagacgtacttattagagaaggtgtaagagaagatgcttaaagcattatagatttttataatgaagtgggtggagaaactcattttctgtcatttggaaaggatgaatataaaatatctttggaggaacaagaaaatgctatagaatcagcaaaagcatctgataattctgttaaactgattgcatttatagatgatgaaatagttgggattgcaacgattgattctaatcaaaaagcaaaaggaaagcatgttggagtattaggaattgttgtaaaagaaaaatattggggaattggattgggtaaaaggcttatgttagaccttatagaatggtgtaaatcaaatggaataaccaagaagataactcttgtcactaatgaagaaaattataatgctataggattatacaaaaaagttggatttgaagtagaaagcatactaaaaaaagaatgttattataatggtgtttatactgatttaataggaatgtcacttttattgggaatataattagtgtacattttatctcgaaaaaagtatattaagtatggtataattaaaaaagaatataacttaatataattttggaggacgaattatgaaaaatctgtgtaaaatatcagatgattatttaaacagcaagcttaagtatttaaagttattatcaaaacaatatccaagtatatcaaaagcaagtacagaaataataaatttagaggctatattaaatcttccaaagggaacagagcattttataacagatgtacatggtgaatatgaaccatttgtacatgtattaaaaaatggttctggtgtaataaagagaaaaatagaagaattgttttcaaatacaataagagacagcgaaaaaaaaatgttagcaactcttgtatattatcctgaacaaaagttagacctaataattaagcaagaggaaaatatagatgatttttatagaataaatatttatagacttatagaactttgtaaatatgcttctagcaaatatactaggtctaaagttagaaaactgttaccagaaaattttaaatacataatagaagaacttttgcatgagcatgttaaaagtgaacataaagaagagtattataaaagtatagttgaaacaatagttgacataggaatagctaaggagtttataattgctatttctacagttatacaaaaattggttgtagatagacttcatgtaataggagatatttatgatagaggtccaagaccagatataattgtcgataagcttattgaacatcattgtgtggatattcaatggggaaatcatgatatattgtggatgggtgcagcctcaggtgaaaaaacttgtatagcaaatgcactgaggatatcagctagatatgcgaatttagacattgtagaagacatatatggaataaatctgttgcctttagccacttttgctatagaaatgtataaagatgacccttgtaaagaatttattccaaaggttaatgaccaaagtgtaacaacaacagaaaagtctttaatggcaaaaatgcacaaagcaataagtataattcaatttaagcttgaaggtgaggttataagacgaagacctgaatttgaaatggaacatagacttttgcttaatatgataaactatgatgaaggtacgattactttaaaaggtaaaacatataaattaaaagatacttatttacctacaatagacaaaaaagacccatataaattaactatggaagaaagaaatgttattgataaattagtatcttcatttagaggtagtgaaaaattacaaaaacatgtttcatttttgttttctaaaggaagtatatatttaaaggctaactcaaatttactgattcatggatgtgtaccattaaatgaagatggaagctttatgtctatgaatataatgggaaaagagtataaaggtaaggctcttatggataagatggagtctctagcaagagaaggatttttctttaaagataaggcagaagaaaaactatatggtatggatattatgtggtatttatggactgggaaatgttcatcattatttggtaaagatgatatgactacatttgaaagatactttatagaagaaaaagagactcataaagaaaataagaatccatattttaaacttagagaaaatgagatggcttgtaaaagattatttgaagaatttgatttagagcttgatgaatcccatataataaatggtcatgttcctgtggagagtaaaaatggagagagcccaataaaagctaatggtaaaattctcgttatagatggtggtttttctagggcttaccaaaaaactactggtatagctggatacactttgatatacaattctagaactttgcaattagtatcgcatgaaccatttaattctgctgaagaagccattgcaaatgaaagtgatatcttatcgacaactgttgtagtagagcataaggcaaagagaaaaatggtgagagatactgatgaaggagtaaaaatacaagaggaaatagaagatttaaaactacttttaatggcttataagaaagggctaataaaagaaatgtagatattatagaggcacttcataattgaagtgtcttcttgttaatacttattaaatatattataaagattaataatagtagtttatattatacttactaagtgaatccaagataaatgggttcactttttttatttataaacattattaaaaaaatatagatgttttggttatattccttgtcctttataaatagaattatataaacaaaggaggaggacaagagatgaataaactttctgatgaaataataaactctctttctacaactataagagaaaaggtagaaaaagtctcaaacaataatctgaacatagaagaaattaggttacgctcacaaaaaccattgatactaaatgcaaactctaaagattatttttacaatcaaaaaactatgacacttgatttaaatcaacaaaactcatatgtagtaacaagagaagatgtagagcaaacttttcaaataatatgtaaatattcaatacattcatttatggatgacataaaaaaaggattcataactttgagaggaggtcatagagtagggttagttggaaaagcaatagtagaagatggacaagtcaaaaatataaagcatatatcatctttaaatataagggtatcaagggaaattattggatgctcggataagattttaagtcatattataaagggaaaaaatcagattaataatactttgataatatcaccacctcaatgtggaaaaacaactttaataagagatatagtaagaaatttaagtaatggtaatgaagattatggatttaaaggtttaaaagtagctttggtagatgagcgtaatgagatagcaggagcttatctaggtgttccacaaatggatgtgggaataagaactgatataatagaaacttgcccaaaagatttgggtattacgatgcttttaaggtctatgtcaccaaatgttattgtgacagatgaaattgggagtgaaaaagaaataaaggcattatacacagcattaaatggaggtataggattaataactactgtgcatggagattcaatagatgatatacaaaatagaaaagaattaaatagacttctggataaagagttatttaaaaaggttataattctttctgcaaaaagaggagcaggaacgattgaaaaaatttatgatttagaagaaaagagatggtattttgcaaattaaaataattattatagctctcttggtaggaagtagttatttgataggtgaacaaatatacaaaacttatactcgtagacataaacaattaaacgatttaataagagttttagaaattttgaggatggatttatctttcggactttatacattagaagaaatctttaataggataggtggaaataaagagttttgtttttggaaatttttctatcaaatatcagaaggacttcacaatgaacaaagtaaaactttggaaataataatatcagaaaatattgatgtcttaagtaaagaaacttatctaggcaataaagaaattgaggaactgaaaaatctaatacttactttagggaaaagcgatatagagtcacaacaaagaatgatagatttatctatagaaaatttgaaaaaacaaacctatgagacaaaggaagatataaacaaaaaaggcgtattgtataaaaaattagtgacattcataggtataggtatatgtattatattgatttaatatggggaggtttattatggaaatatcattgatattaaaggttgcaggtgtcggtattctaatatcagtattgaatatgatattggaaaaaacagatagaaaagattgggcaggtcttactacattagcaggtgtaataatcgtattgggtatggtaataacagaaataagtgacttgtttaatactgtaagaacaatgtttcaactttactaaaaaggagggagtaatttggaaataatgcaattaataggaattgcaatcatttcaactacactctgtttagtaattaaaaaagatagaccagagatagcaaatttcatagcaataataactggagtaataatactattgtcagttatgtttaagctaaattttatagtagatagtatacaagatttggctaacaaggctaacataccgactatgtatatatcattaataataaaattaattgggatagcatacttaatggaatttgcgatacaactttgtaaagattgtggggaaggaaacattgcttcaaaactagaatttggaggtaaaataatagttatgtcaatgtctttccctatacttttgtccattgtagaaatggtggtgaatataattccatagatgtgtatcttggaatgaatataagtatattagagaactttcgttgtattgaggtttatagagtgaagagaggcatggttgcttatgaaaaaaagatttttaccaatgattataggttttttatttactttcttttttgtaaatatctttgctattatgatatttgctaatgaagtaccaagtagtgaagataaagaatatggtgaaacaaaaaatagcatagataaatatatagatggtcaattagacaagctagatataaatgagattcaagactatataaataaagaaatagttattaatgatgttaatttaaaatcatttgtaaaagatttaattagtggagaaaaaaatatcttagatttattcaataaagatggattgaagatattgatgtttgatgaatttaaagcaagtttaaaggtagtagcagtaattttggtactggctctgttatcatctattttaaagagtctggaaaactctttttcatcaggtgcagtaagtcaaatagcaacatatataatatttatcacaatggtatcacttacacttattggttttaaagatgtattacagatttgttatgatgcaatagaccatactgtaggtcttatgcaagttataatgccaatattaataacatttttacttttaattgggttcccaataacgtcgactactttgaatcctatcttcataggaggagtaacatttataaatgtattttttaaaaattttctatttgtatctattactgttgcatttggaattttaataataaacaatttatcaaaaaatataaggctaaagagatttttctcctttgtaaaacaaataaattatgtttctattggagctatgtttactgtttacttaggtcttgtatccatacaaggattgtatgtaaccagttttgataaattcagtgtaaagactgctaaatttgctataggtaattttattcctgttgtaggtggatttgtatctgactctgtggatattttattatcttcatctcagcttataaaaaatatatttggaggaatagggcttatcttacttgttggaatttgtttacttccagtaataaaaattttatcagtaatagtagtgtacaaattagcagcaataattgtagagcctgttggagaggatggaatatctaattttttaaatgaagtggcaaatttaatgataataatgctagcatcagtaattgctataacagtaatgttctttgtaactgtagctatcttgacctcgataagtgtcgtaagtcaagggtaatttatatatcagtgaaaaataattacatttaatctaatgtttttagagaggaggatgctatgttagagggcataaaggcatggatagttagtgttttgataggagcatttatagtaaatatagtagatatgattttaccaagttctaagataaaaccttatgtcaacctagttttaaactttatgtttgtatttattgtaataactccagtagtaggatttttttcaaaagatatgagtttagaagatagaatattaaaatctatgggaaactacaacaagcagtatgtagatagtacaaatgctttggcaaaagagactggaaataatagtctatccaagggatatgaggatgggttaaaagaagtacttaaattaaaacttgatgaatatggttatgatttagaagatatagagcttaatggggcaaatataaataatataaaaataaaagaaaagaataatagtgcaaaaagtaataacagttccaatgaagaaaataaaaataatagtactaaaagagaggaagaaaacataaactctaatgacaaagaaaattctaaacaagtcttcaaaaaaggtacagagtatgggttgaacctaaatgaagaaaaattaaaaaacgacttaataaaggtgctggatgtttctatagaagatatacaaattgataaataggagttgggagaatgttgaaaaacttaaatgacaaagataagagaaaggtatattcactaataactatagcaggaatatgtgtggtttcattagtattattatcttgttttcctagtagcaaaagtgataaacaagttggaaaaacagagactaataaaaatgctgaaaagcaagtcactaaaaaacaagaaaaagatgatttagagtcaaaattaacagcaatactatctaaaattgatggtgcaggagacgttgatgtaatggttacatttgaatcaagtgaagaaatacaacctgcttttaattcaaataatacaacagaaacaacagaggaaaaagatgcacaaggtggagaaagaacagttacgacttctagtgaaaataaaacaatgataacttcaaattcaagtgaccctgtagttataaaaactacagagccaaagataaagggagtgatagtggtagcaagtggagcaagtgacccaagtgttaaagagacactttatagtgcagtacaaacatcattacaagtagctggtcatcaagtagaaatatattctaaataaatacatataaccggggggataaatgaatgaagtttaattataagggaagaggatttgtaataataactttaactgcaatgttagtggtagtaggaacagtgaattatcaactaagtaagaaatctttattagaaacatcaaaagagtttaaggcatatgaagaagcacagttgcaaaaaaatactgatgatagtgatagtagtaagacagaggattctagtaatgtagataaacaaggtggtaaggaaagtgctgatattgatatagtcgatagcaaagctagtaaagtaaaagaaaaggcaactgagacaagtaaggaaataaaagctcaattatcatcagagaaaaatatgaaaaaggcatcttatattttagatatgaaaatgaatagagaaaaacaaagaaatgagttagttcaagatttaaatgaaatgataaataatccatctacaacagaagaatctagaaaagaagcttctaatatgaaattaaatatagttaaaattcaagaaaaagaacttcaaatagaaaaccttttgagtacaaaaggatatgaagaagcgttagtttatataagcgataacaaagttaatgtagttgtaaatgaagctaaattagaaaagaaagatgcagcaaaaatatttgatttagttgcagaacaagccaatgtgaagtatgaaaatattaaacttacaaataataatagtaataagtaaagtataaacctcagaattaactgaggttattttcttgcaaagtagacttgtatttggtattattatacttataaaaatagttccttaaaatcaggaggtaagttttaatatggaagataataaatttggacaagtaaaaatatctaatgatgtaatagctacaatagctggtttagcagcattagaagttgaaggcatagaaactacagcaacattaacagataagttgttaaaaaataatggagtaaaaatacaaatcgaagaagaggatgttaatttagatgtaatggttacgataaagtatggaatgtcaataccagatacagcttttaaagttcaagaaaatgtaaaaaatactgttgagacaatgacaggactgaaggtttctcaagtaaatatacacattcaaggaatcagctttaagaaggataaagttgataaagaagaagcaaaagcaactaagaaaaattaatattagccctctgaaaagtcagagggttttttgctggtaattgattttatatggataattaaacttaaaggagaattttgattgatgaaaaaagatagggcacaaaagagtacaacaagagaatatataatgaaacttatataccaaataaatattaataaagaagattttgaaactttagaagataaagtagataattttttaaaagataattcagaacatattataaatagatataaagaacttgcacttcaatactcaaaaaatacaaatttaaagttagaagatactgaaattgaagatgttatagacaagaaatatataaatacagtatgcaaagcattaaaagaaaatcatgacaaaatagatgagttaataaataagcatgctaaaaactggacagtagatagaatgccaaaggtagatgtttctatacttagattgtctgtgtgtgaaatactttatttagacactcctaataaagtatcaataaatgaagcggtagaacttgcaaaaatatattgtgatgataagtctcctaaatttataaatggtatattgggaagtgttgttgatgaaattgggaaataatataataattggaattgatactagctgctatactacttctatagcagctatctctttagataagaaagttatattcaatgaaaaaataatgttagaagtaagggataattcaaaaggtttaaggcaaagtgaagctgtatttcaacatatcaataatttagggattcttagtgataggataaaatcttttaaagataagtttaatgtagaaggagtttgctcatcaaaaaaaccgagacctgttgaaaactcatatatgcctgtattcaatgtaggtcataattttggaaaattattgtctagtatatatggttgtaggttttatgagactactcatcaagagaatcatattgaagcaagtttattaaatagtaaattaaaaaataataataaatttatttctgttcatatgtctggtggtactacagagatacttttaacaagcaaacaagatagtcatcacaatgtatgtgatactaatttaggtaaaattgccaaaataagtattaaaaaagatgataaaagtaagttatacaataattttggatataatatagatataattggaggaagtaaagatattagctttggtcaactcatagatagagtaggaattaagcttggatataaatttccttcaggaaagtatttggatgaaaatgctttaaattgtaatcttaaaatagaaagtggtctgaaaacttctgtaagagatgggtatatgaatttatctggattagaaaatcaggtaaataagattataaatgataatggagataatactaatcaaaaagaatacatatctaaattagtattagattcagtagttagaaatatgtttaaatctttagtatatttatgtgaaacttataatgtaaatgaagtagtatttgctggtggagtttctgcaagtaagtatattcttagagaattaagcatgaagttaagaaaaaagcatatagaagcttattttacagaaccacaatattcaactgataatgctgtcgggtgtgctataataggattgaataactttttaggagaaagagtatgaaactaagagctttagatataagtgaagcaaactcatatattaaaagaattttaataaacgacccaatactttctaatcttaaagttaaaggagaaatttctaattttaaggttcatagtagtgggaatgtatatttatcacttaaagatgaaacatcaaagttaaactgtgtaatttttaaaagtaattttaatcgcaatttaaaattagataatggtgtaaaaattatagctaatggatatatatcagtctatgaaagagatggtgcgtatcaattatacattaatgaaattgaaatagagggaataggaaatttacacatagagtttaatagattaaaggaaaaacttaataaagaaggattatttgaccctaaatacaagatacctatacctaaaatgccaaactcaattggcgttataacatctccaacaggtgctgttataagggatataataaatgtaataaaaagaagatatccgaaagttaatataaagctttatccagtaatggttcaaggagataaatcagctgaagaaatctgtgaagcaattagatttttcaatcatatgaagaatgttgatacacttatagttggtagaggtgggggttcaatagaagaactttggtcttttaatgatgaaatggtagcaagagaggtttttaattctcaaattccgataatatcagcagttgggcatgaaacggattttactatttgtgactttgtgtctgatatgagagccccaacgccatcagcagcagctgagattgctactccatcattggatgatataaactataaacttggaaacataaaaagtaggatgagtaagtctcttacaaatcaaatagagctagaccaatataggttagaaacagtatttaataagataaataactatttagattcgtacacaataaaagataaagttatacaattagacaaaatatatgataaaataatttttggaatagaaaataatttaaaattagaagatgaaaaattagtaaaaattggagcattactccataatttaagtccattagctactatggatagaggttatagtataactcaaaaaaatggaaaagtaataaatagtataaaaggattaaaaataaaggatagtatagatatagtattaaaagatggaaatttagaatgtatgatagataaaattgaaaataaagagggatagtatgaatttaacctacgaagaagcttataaaagattagaaagtattttaagtgaattagaatctaaaaatgctagcttggatgaatctttaagcctatatgaagaaggtataagcctttataaacattgtaataagcttttagatgatgctaaattgaaaataagtaaatttaatcaattaggaatagaagaagactttaaaatagaggaggaataaaattggaatttaaacaatgtctaaaagaaaaagcaagttttgtagaaaaagtacttaaagaatatatgcctaaagaagaagggtatcaaaaaactgttattgaagctatgaactatagtttaagtgctggaggtaaaagattaagaccaatacttacattggaggcttgtaaaatagttggaggaaatgaagatgaagctattccttttgctattgcaattgaaatgatacatacatattcactaatacatgatgatttgccagctcttgacaatgatgatttaagaagaggaagaccaacaaatcataaagtatatggagaagctatggggattttagcaggagatgctttgttaaactatgcttttgaagtaatgcttgcaggctcaatcaataaagaaaatccagaaaagtatctaaaagctataaatgaaattgccaaaggtgctggtatatatggaatgataggtggtcaagtagtagatgtagaaagcgaaaataaacaaattgaaaaagaaaaattagattatatacatatgaataaaactgctgcaatgatggtaggctgtatgagagcaggagctactataggtggagcaaattctgaacaaatggaagaaataactaaatatgcaaaaaatatcggattatcattccagatagtagatgatatactagacatagtaggagatgaagctaagttaggtaaaaaggttggaagtgatatagaaaatcataagtcaacatacccatctcttttaggtttagataaatctaaagaaattgcacataatttgattgatgaagcaaagaaaagtatagaaaaattatctgatgatgtagattttttaaagggattggctgaatatataatagatagagaatactaaaatatacagctaaaatcgaggagggaaaaatggattttttttcggagatttttaacaatggggctttgggaataagtctgattgcttgtttcttagcacaatttataaaaatatttactggtaaggaaaaaagaattgagttatcaagaatacttatttcaggaggtatgcctagttcccatagttcttttgttacaagtttagctacagtggtaggtattgaaaaagggtttaattctactgattttgctataattaccgtacttgccttaattataatgtatgatgcagcaggtgttagacgagctgttggtaaacaagctactatattaaatcaaatggtggcagatatacagcatggaaagcatatagagcagaagaaattaaaagaattaataggtcatacaccactagaagtttggtttggagctttacttggaatagtaacagctttaatattgatgtaaattgaaaatttacagaataaaggtgaggataatatgtataaatatttagataaagtaaattctccaaaggatataaaaaatatgagtatagaagaaatggatttacttgcaaaggatataagaaagttcttagtaaaatctgtttcaaagacaggaggacacttagcttctaatctaggagtggttgagttaacattagcacttcataaagtatttgatagccctaaagataagattgtatgggatgtagggcatcaatcttatgttcataaaatagttactggaagaaaagattgttttgtatctttgagacagtttaatggactaagtggttttccaaaggagaatgaaagtcctcatgatatttttgatacaggacatagcagtacatctatttctatagctacaggtattgcctgcgctagggatataaaaaaagaaaactatagtgttatatctgtgataggagatggttctataacaggaggtatggcacttgaagctttaaatcaattaggatatatagataccaatatgatagtaatccttaatgataatgagatgtccatagataaaaatgttggaggaatgtctaaatatctgtcaagtattataagaaactcaacagttgagaaaatgacagatgaagttgataaaattttaaatgttacacaaacaggtgaaattttatctaagactgcacatagatttaaagataaactaatgtatagcttttctcctcaggactgttcattttttgattcattaggtataagatattatggacctatagatggccataatactaaagaactaatagatatattgagaaaagctaaacacaaaaaagggcctgttcttttacatgtaattacgaaaaaaggaaaagggtacagatttgcagaagaacaacctgataaatatcatggagtatcaaagtttgatataaagacaggtgttacatctgcaaaagttaagtctatgtcaattagtgttggagaaaaacttgttgatatggctaataataatgaagatatagtagcaataacagctgcaatgccatctggtacagggttaaacctgtttgaaagtgcatatccaaaaagatattatgatgttggtatagctgaacaacatgccacaggatttgcagcaggtcttgcaaaaaatggtatgaaaccttactttgctgtgtactcatcatttttgcaaagggcatatgaccaagttattcatgatgtatgcataacaaaaaagccagttacttttcttatagatagagctggattagttggaaatgatggagaaactcatcatggtatgtttgatttaagttacttaaattctattccaaatattgtagtaatggctccaaaagacacaagagagatggagcttatgatggatttgtcattaaaattagattgtccactagcaattagatacccaagaggaagtagttattacctagataagggagaatatggagagattgtactgggtaaatatgaggtattagatgacggtcaagatacagtcatactttgtattggaagtatggtaaaacatgctttagaggctaaagaaatattatcaagagaaggaataaatccgacaatagttaatgctagattcttaaagccaattgatgaaggtatgttaaaagcattattaaaaaatcataaaaatgtagttactatagaggataatattgtaactggaggatttggaagtagaataaacaagtttattatagataatgaatataacgtaaatatacttaatatagcaataccagaagaatttgtaaaacatggcaatatagatgaattatatgattttgtaggattatcgccaaaaagtattgctgataaaataaggaaattagttattgagtaaaaatctaatgtagatattgtaaattaaaatttatataaaatatagaatttatcaattagaataaatatcaagtgtgttacttcaagctactttagttatcattaaagtagcttttaacagaaaggtaattgtatgaaaaaaagaatagatttattattagtagaacaagggtactttgaaagtagagaaagagccaaaaaagcaataatggctggattggtttttgttgataatcaaaggtgtgataaggctggtacagaagtaaaagaagattgtagtatagaagtaaaaggaaatccaataccatatgtcagtagaggtggtttaaagcttgaaaaagcaatgaaaaactttgatttgactattgatggaaaggtatgtatggatataggggcatccacaggtggttttacagattgtatgctcaaaaatggagcaataaaagtattttctatagatgttggttatggtcaacttgcatggaaattgagacaagatgatagggttgtgtgtatggaaagaactaatataagaaatgttacaatagaatatacaaagcagtttgctgattttgcgtcaattgatgtgtcttttatatcgttaaagttagtacttccaaaggcaaaggagttagtacgtcatgatggggaagttgtcgctttaattaaacctcaatttgaagcaggaagagaaaaagtaggtaaaaaaggagtagttagagaaaaatctacacatatagaagttataaaaatgatttctgatttctcagtcgaaaatggatttgagattttagggttagatttttctcctattaaaggtcctgaaggtaatatagaatatctaattcatttgagaaatggaaatgaaggatatgaatttgatggtgagacatacaataacaaaatagtagaagttgttgaagcttctcataatttagacaaataggttaaaagggggcttagatttgatcctcgaattatatatgaaaaattgtgccttagttgaagaactaaggttgaatattgataaaaacttaaatatacttacaggtgaaactggttcaggaaaatctataataatagatgcacttggactttgtttaggtgataaatatgataggtcttttttaagaaaaggaacagataagggacttgttgaggctgtatttttttcagacaatagatatcttaaaaaaatattagaagaaaatgatataagtatggaagatgataatttattggtaataactaggttgatatactcagatggtaagagtactgctagagtaaatggaaggactgttaaagtgtctcttcttaaagaaattgcatctacacttatagatatacatggtcaacatcaaaatcaagctttgttcaataaagatactcatttaaaatttctagacctttttggagaaaatgaattggaagagtttaaaattgcttataaaaatgtgtaccataagtatagtgaagtaaaaaaagctttaaattgcttgacagaaaataaagatgagatgcaaattcaacgagaaatagatttattaagatttcaaataaatgaaattgaagctgcaaatctaaataagaatgaatatgaagatttattaaaacaaagagaagtttatagaaatagtgaaaagatatataataatctaaattcgagttatagcaagttacataatggtgagtataatgttattgacctaataggtcttgcatctaaggaacttaatgacatatctaaatatgacagtgttttaagtgaatatagtgatactgtagaaagaattatgtatgagttacaagacatatctggtgagataagaaattacaaagataatatagactttgaaccttatgagctagagcagattgagcttagaatcgacgaaattaataatttaagaagaaaatatggagacagtatagatgatatatttgagtattatggaaaaattaaagatagattagatgaaatattaaatagagatgaaagagttgaacagttaaaaagcaaactgatgaatatagaagaagatttaaaaataaaagccagtaaattgactaaagcaagaatagaagtagcaactactttagaaaaaatacttcttgatgaattaaaaagcttaaatatgaaaaatgtaatgttcaaggttaattttgaaaaaggttcatttactttagatggagtagatgatattgaatttatgatatcttttaacttaggagaagatattaagcctatatataaagttgcatcaggtggtgagatgtccagatttatgttagcgtttaaaaccatattggctgatatagatgatattgatacattagtgtttgatgagatagatactggaataagtgggatagcagcacagatagttggtgagaaattgagtgatatagcaaagaaaaaacagataatatgtataactcatttacctcaaattgctgcaaatgcagacactcattattgtatagagaaagatacttcaaataataggacgtttaccaatgttagtaagttaaatgaatctcaacgaaaaaatgaaattgccagacttatagcaggtaacaatataacagaaaaaactattgaacatgcaagtgaaatcattgaattggctaaaaaatgttagtgaaaaacaagcattttaataggtgtaaagaatttttatagaaatgctttacacctattttttatgatgaaattattttaaaatatctagtgcctatattgaagaaaagtaggtttgaaaatggaatgaactttgtataaatttgtaactttgaaatttctaaatgcttaagtataatattatttattaaggtagtagtgaggggaggcataaaatgaataaaaaagatactatgcacttaatttttataattgtaatttttattttattatggtatattgtggtagcagtaagtgagattaataaaaatattgaaagttgtagtaacaaattagattatttgtcacaagagcttatgagtactaagtcggatattagtaatactataaatgaagaaatgtcaaaaagttatataacaaaaagtattgacttaaaagtaaaaaaaatcgagaaaaaagaatgtactattgatgtagatgttcaattaagtaaacttggaaaaaatggaaaagtattttttatgtataaagaagatagtgataaatggaatgaaactgagatgacaaaacatggggaattatcatatgcatgtgaaataaagataaatacaggaagtgaatatgattataaagtagttacaagtggagatatatctgaaagttctgatgtacaaaaactgactaaatctgattatatgcctgaacaacctatatttaattctgggataagagataatagagaatactttattgaaatagtagaaaatagtaatctttttaatcatgagagtgaaaagtcaaaaaataaagcttacgataatatcaggttagaaaaagtagatattattgtaaatgaaggaaaaaaagacactatatacaaagcccaattagctgaaggcttagatgatggcaaaactaataattcaaatagaaatcaagtgaattatgaagtaagttttcctaaaagggatattgatgacataatttatattaaagctaaacttacatacaataatggagtagaatatacaaaggatataactgaagatataactatgggattacaagatttagaaaaataaatacatatttaaataaatattcaaatagatttgttcacaaatagagtataaataaaactgtagtagttttacttatactctattaaaaaattataattttaattccatatatctagccccttcaattggattataagtataaagttctatatcataaaaaccaaacttttcatataatccttgtgcacttttcatgcttggaagagtatctaatctcatgtgtgtatatccaatttttttagcttctacaatgatttcttccaatagtatttttcctatttttaatcctctaaattgatttcttacatataatctttttaattcacatattttaccttcaagtttttttaaagcaacacaacctgccaaattttcatcaacaaatgccaatatcaatgagcctgaaggttttttatattttcctggaagtgtttttaattcattattaaagtcttgaaaacataagtctatatttagagaatttgaatattcagtaaatagaagttttacgttttcaagattttctaaatctttttcttcaacaaattgtaaagttatattttgagccattttatccgccattatataaacatgtttatataatgacttcacctccttgatatatgtatatttttcttaatatcaattagattttaataccattactttttcaccaccatagtcaagctctccattaaacttaaatccaaaatctttataaagcttaatagccattttattgtcttcgaatatactaagatatagttcatcacagttatattcatttttaagatgatttacaagaaaatctaatgatgcttttccacatcctttaccttgatattttgaatcaatcataaatctatcaagccaaactctatcatcttctaaacgaccatacatagcaaatcctattaaagaattttcatcatatattccaacaggtacccaagctgttataaatttagattcagcaatagaaagtgcattgctttctatgtaatctaactgacttttatctacagacaaactaactaaatcgtgccaattatttatgtctgcaattcttacatttaatttcaagatattaccgtccttcaaactttttgttacaatctaatactatcatattatgtattaaaaatcacttattaagattttaaataaactttttgaatgaataaattctcaggaaaaaggaattataaatacataataatacagcataggagtagatggatatatgaacaaaataaataaaaatttcaaaaatatttggataatattaggagctgtatcgatttttaccatggttataatttttaataaaaattgtaatgttaataaagagactcaaatagaagcttttacaattaagaatcatgataaaaaatttgtatatcctatgggaaatataattggagtaaaagcaaatacagatggtgtattggtcttaggatatgaggaagaggatgtaggctatattggaggcatacaaataggtgataatatagtaaaaatagataataaaaggataaaaaatagtcaagatgtatcagagattttgaataagattaaaaaaagtaaagttgaagtgacttttgagagaaaaaataagtataaaacagaagtaatagagactaaaaaagaaaatggcaagtataaacttggattatgggtaagagataaaatatctggaattggaactatgactttttacgaccctagtatggaaaagttcaaagcaatcggtcatgccataaaagattcggatactaatgaactattaaagataaagcaaggctatatatataagccagaacaattaaaaatagtaaaagctagtaatgaaaaagtaggtaaaataaaaggagattttaatgacagcaatttaatgggtaatttctcaaataattcagagctaggtataagtggtaatattacagaaaaccataataaagagtttaatgtagcaaataaagaaaagcaattaatagaagttggaagaccgcaagatgtaaaaataggagatgcagtaattctttttgaggataaaaacaaaaatataacaagctatgatataaaaatagaaagtatagtatatgataaaggaaattatagagatatggtaataaaagtagtagatgacaagttattggaatacacaggaggtatcgtacaggggatgagtggagctccaataatacaaaataataaaattattggtgcaataactcatgtttttagagataatccgaaaaaaggatatggtatttttatagatgaaatgataaaattgtaggtgaggcattaaaaaattttattattttatcaattatctaggaggaatataattttggagtgtcgaatatgctttagagtagataattaggaagcaattgtgtaaaaagtttagttttctgtaataagaagatgttttttaatggggggatttttagtggaaaaaatcaaaatagttttagcagatgacaataaggatttttgtcaggtattaaaagagtatttgtctaatgaagatgatatcgatatattaggcatagctaaggatggaattgaagcattagacttagtaaaaaagacacaaccggacttattaatactagatgtaataatgccacatctagatggattaggtgtaattgaaaaattgaatactatggatatacctaaaatgccaaaaataatagtactatcagcagtaggtcaagataagataactcaaagcgcaataaatctaggagcagattactacatagtaaagccatttgattttgttgtgtttataaacagaattagagagctagtttctaatagagttacacaagttgagccaaaacctagaccagttcaagagactcaaatgactagaagtgattttgttaagaatgtaggaaatatagagacagaaatcacaaatataatacatgaaataggagtaccagctcatataaaaggatatttatatttaagagaagcaataaaaatggttattgataatgttgagcttttaggtgcagtaacaaaagagttatatccaagtatagctaaaaaattcaatacaacaccaagtagagttgaaagagcaataagacatgcaatagaggttgcatggagtagaggaaaagttgacacaataaatcaattatttggatatacggtacacaatactaaaggaaaaccaactaattcagaatttatagcaatgattgctgataaattaagactagaacatagtatggttaaataaacaagacataaaaagtaaggctttttaattaaggcattggctataaatgcgtattacaagcagcgaaacggtataaccactagggttataccgtttcgctattttaataaatataaaaattttctttattatttgcttactatatcaatataataattttattatactatggatatagtatgtgtctttacaagttgtaaactgacagtggtttattttttaatataaatattgactttgatgcaggtaaactttgtatttttaagcgtattatggaatatgttaaataaaaaaatgatgaaatatagtattgtaaatgccaaagatgcaaaacaaacttaaaacatttattttattgttaagtaatgctataatataatgtgattttaataatgatagtggaggtttaaatatgagagtcgaggcccctataaaagtagatcgaaaaaccaaaaaacttgctaaaagagttgaaagtggggaaatagcagttataaatcatatagacatagatgaagttgctgcaaactctttagtagaagctaaaataaaacttgtcataaatgcggctccttctataagtggtaggtatcccaataaaggtccagggatattaactgaaaataatatactaataattgataatgttggagaagagttatttgaagaattaaaagaaggagaaactatagaagttgtagatggaaagatatatagaaaaggaaaatttttaggtgcaggagaagttttagacaagtatgaggtttcacaccaaataaaggctgcctatgagaatttagctgtagaattggatagatttatagataatactatagattatgctaaaaaagaaaaaggatttatacttggagaagtagaaattccaaaagtgaaaactaattatgctaataaacatgtattgatagttgtaagaggtcaggactacaaagaagatttaagtactatgctttcttatatagaagaggtaaagccagtattggttggtgttgatggaggagcagacgctttaattgagtttggatatactccagatgtgattgtaggtgatatggatagtgtaagtgatgaagctttaaaaaaggctagtgaaatagtagtacatgcttatacagatggaagagcaccaggtcttaagagggttgaggaattaggcttagatgcagttgtatttcctgcgccaggaactagtgaagatatagctatgcttatcgcctatgagtataaggctgagttaatagtagcagttggtacacattcaaatatgattgattttcttgaaaaaggaagaaaaggtatggcaagtacttttttagttagactaaaaataggttcaaagcttatagatgctaaaggcgttaatttgttatacagaagtaaattaaaaataaagtacatatgggcattaatagcaacagcattatttcctgtgttggtagttgcatcattgtcaccaggagttcaacagttcatacaactaatgcaattaaagtttagagtattattacagatgtaaattttaggaggataaatatgcatattaatatgaaatattatatagtcactataggggctatatttatagctttgggtataggcatgttagtaggatttaatttaaataataatcaacaattaagtgaacaacaagcaaacataataaatgatttggatgataagtttaatatcttaaaagaaaaaaatgataaacttgacagtgacttagcaagtgtaaatagagattatgaagaggcagttaattttataaataaaaatgtagataagattttagctggttcgctgaatggtaaaagtataggaataatatcggctaatgaaaatgacgattatacaaaaaatatagaagacataataaataaatctaatggaagtattgcatttaatatagtattaaaagaaaatataacaaatccagaaaagttaaaggaaatgtcaactaaactaggtacagatgtaaaaaatgcaaatgatgcagttaattatataattgacacccttaaaaaggaagatgcaagtgacattttaacatatcttcaagaactagatgtaataaagtttaactctcttggaaatacatatctaaaatatgattctgttgtaatagctggtggaaatgatgcaaaagacagtacaaaacagtttgaaaaaatagaaaaatttgtagtttcaaaacttaaatcagagaataaatatttagtagaagttcaaaatacaggagttaaaacttcttatgtagaactatattctaaaaacaaagttgcaactatagacaatattgatgaaggtataggaagtatatctctagctattcttctacaacaaggtaatatagttggtaattttggtagattggatactgcaacttcattgttgccatctattaaatagaaataattttaaggagagaaaaaatggattcttatataagtataataataccagcttataatgaagaaagtagaataaaatatacattagaaagcatattggacattaagcaaataaatgaaataatagttgtggatgatggttcaattgacaatactgctaaggttgtatctgagctagaaaatgaaaagattaaattttttaagttagataaaaatagaggtaaaggatatgctttaaattatggtatcaaattagcaatgaaaaatgcagatattataggttttctggatggagatttaggaagctctgctaaagaagttgaaaaattaatagtacctatattaaatggtgaggcggatgttacaatagccaagtttcctcctgcaaagagaaaaggaggtttgggatttgtaaaaggtttagctaaaaattctgtgtttgagatgactggtgttgagttagatgcaactttatcaggtcaaagaatatttaaaagagaagttttagaaaagtttgatgaaataccttttggatatggagtagaagttggaatgaccattgatatattaaagtatggatttaaaattaaagaagtattagtaaatatgactcataatgaaacaggaagaaatttaaaaggttttattcatagagggaaacagtattatcacataaaaaaggttttaggacaaaaaaagaaagaatggaggtaatatcttagtgaaagattatatactttataccattttattattaactggattatttggaacctatgctgtaattccactatttaaaaatttattgataaatggaaatgtacttagaccaaactataaaaaagatatgataccagtaagtatgggaattgtatttttgcctatgattgtaatcaatggaataatacttgctttctttactacagaatttaaggatttagcgtatatatttatgtttatgtttggtatgatatccatgttttttgcagggatactagatgatgtcattggaaatagagatgtaagtggtttaaaggggcattttaaaagtttatttaaaggaagtcttacaacaggaggttttaaagctttatttggtggatttgtagggcttatagtttctgttgctatatcaaaagacataattgatataatagtaaatacactaataatagctctatcaactaatttaatgaatcttttggatttaagaccaggaagggcaataaaagcatatttattcataatggtaattatatttttaacattgacaggatttgttcaagttcttccattacttatagtaccaaatgtacttgcatactttaattatgatttaaaagcaagggctatgatgggagatactggttcaaacgtccttggaatatctattggaatgctcatttcttttgggtatccatttaacattagattaggatggttaatatttgtagttattatgcatatattcactgagaaatactcattaactaagataatagaaaaaaataaactattaaattttatagataaattgggaaggtagtattatgataagcaaaagagtggggattgttgaatcaatagtaagtcaaactgaaactctagatgatataagagtaaatataaatggaaaaatacaaagggcatataattatcccaaaatatctggaactataaatataggtgatgaagtggttttaaatacaacagcagtagaactgagcttaggtacaggtggataccattttgtaataactaatttaaataatatagaatctactttaactgaaggtgggcatataatgaaacttagatatacacctcttcaaataaaagtggattctgttgaggaacaagaaagtatttatcatgataaatttgcgaattttaaaggattagaaggtctttctgttgtagtagggactcttcatagtatgttaactccatttgcagcttcatttaaaagaaataatccaaataaaaaattagtatatataatgactgatggagcatctcttccaatttatttaagtaaaaatgtggacactttaaaagaaaaaaaattaatagatagtacgataactataggaaatgcgtttggtggagattatgaatgtataaatatatatactgcattaattacagcaaaagaaatactaaaagcggatgcagtatttgtcagtatgggacctggaattgctgggacaggaacaaaatatggatttacagggattgaacaaggctctattcttgatgccgtaaaaaaacttgaaggaagagcaattgcaattccaagaattagttttgctgacaaacgagaaagacatcaaggtatttcacatcatagtatgactgtatttaaagaaattgtaaatgtaaatgtagacataccaataactatatatgatgatgaaaaattgaactttataaaagagcaaatcaatttaaatggtttagacaaaaagcataatataatttatatagataataataaaacgaaagaggatttagactattttaatctaaaagtaaagagtatgggaagaaattatgaacaagatgaggcatttttcaaagctgcaagcacagcagcatattacttaatggaggtttaagatggtattagaagaaaaaactattagtagtgatagggtttatacaggtaaagtaattactttaaaggttgatactgttgaaattccagggcaaggatatcaaaaaagggagttagtagaagttggtggagcagtaggaatagttgcaatcacagatgataataaagttgtactagttaagcaatttagaaaacctatagaaaagccaatctttgaaattccagctggtaaactagaaaaaaatgaaagtccaaaagaatgtgctgaaagagaattaaaagaagaaactgggtatagtgcaaaaaatattaagctaatacataaatttttcacttcagcaggtttttctaatgagataatgtttgtatatttagcaacaggtcttactccaggagagaataatttagatgcagatgagtttttagatgtctatgaaattgagcttgaagaagcatataacatggtattaaaaaatgacgttgaagatgcaaaaacatctattggattattattagtaaaagatatgtttaaaaattaatatttataaaatgaataaccctttgtcctaaagcatattattttataaaggacaagggggaattaaattgagaagaacatatagaaaaaatgattttagagaattaaatagacaaataattattataggattgttgtttatgatgtctattgttgttgggtcttacataaataaaatattgccaggttctagtaacaatatattaaacaatataaatcctgctgtagagtattataatctaaatataagcataaaagatacagtgatacaaaatttaaaatcagatgcaatctttatgggctcaatagctctattaagtctatttgtagtaacaattccagcagtgttggtagcttttgtattaaaagggatgtcaattggttatacaataaatagttgtatattggcattaaaatttaaaagtataaaaatgattttaataatattatttaaaaatttgattattattccatgtgcaatcatattagcattaattagtttaagttattttaaagaaatggtttatgaatttaaaaagaaaaatagaaaaaatatgcaatttttaattaagaggtatatactaaatattataattataatagcactatcattggggttgcaattaatattaaatactgtaagtattggtattattaagttcctagctaaataaaggagtttataatggatattatagagggatatatagattacataaaagataaaaaaaaattatcagagaacacagtggcatcatactttatggatataaaaaaatatatggaatatataaatcaaaaaagcattaaactagtagatatagtagaaaatgatattataagttacttaataaagttggaaaaagataatgtatcaatagctacaatagcgaggatgatatcctctataaaatcttttcatgattatttatttttaaatcatatatgtacaaataatcctgcaaaggatataaaaaaacctaaaataaaaaaagaaaatataaatatacttacagaagaagaaattgaaagactattaaattttccaaagttaacaacacctaaattgattagggacaaggctatttttgaagtattatatggtactggtataaaagtatctgaattagtagagatgaatatagaggatattgacctagatattgattatatatattgtaattcatgttgtaaaaatcaaagagtgataccactttgtgatattacaaaactttacttagaaaagtatctaaaagaagcaagacctaaaatggctgtagaaggtgaaaaatcattattcgtaagttcattaggtcaaaggtttacacgacaaggtctttggaaagtcataaaaaaatattctaatctagccaatatagataaaaatataaatcctacaatgcttagacattcatttgctattcatttgttaaatgaaggtgctaacattgctgttgtaagtaaaattttaggaaatgttaatttatctagtttgcaagtatatttaaatcatatagataaaaacgtgagaagagaaataaaggaaaaacatcctagaaatgatgttgatgtagaattacaaaaagcagaagctaaatagactatatagcaaattttataatttaaaaggagtatatttatatgagcagagtaatttggattgtaattgatagtgttgggataggagcattacctgatgctgaaaaatttggtgatagtaaggatgtaagtacccttggaaatatatttaaggaatatccagatattcagattcctaatatgagaaatttaggtataggaaacatagatggtatagatttttttgaaagtataaaagaaccaataggttgttttggaaagtgtaaggaaatgtctcagggaaaagatactactacaggtcattgggaaatgactggtataatagttgacaaaccatttaagacatttgaacatggattctctaaggagataatagaagagtttgagaaaaaaactggaagaaaagtagtaggaaataaaccagcttcaggaactgtaataatagatgagtatggagagcatcaaataaaaactggagatgtaatagtatatacatcagctgatagtgtatttcagattgctgctaatgaagaagtaattcccctagaagaactctataatatgtgcaaaatcgctagggaaataatgatgggggataatgcagtagctagagtaattgctagaccattcataggtaagaaaaaaggtgagtttgtgaggacttcaaatagaagagattattcactagacccatttgaaccaacagttcttgataatataaaagaatcaggacttgatgttttagcagttggaaaaatagaagatatttttaatggaaaaggaattacagatgctatccacactaaaagcaatatggatggagtggatgaaactttaaattatatgaaacaagataataaaggtctaatatattcaaatctcgttgattttgattctaaatatggtcatagaagagacccagaaggatataagaaagctcttgaagagtttgatagtagacttcctgaaataatggctaatatgagagaagatgatattttaataatcaatgcagaccatggaaatgacccaacatataaaggtacagaccatacaagagaatatatacctgttatgatttatggcaataagattaaaaaaggttttaatttaggagtaaaagatacttttgctgatattggagcaactgttgcagatatactaaatgtaaagttgcctaaacatgggtcaagctttaaagaagatttattttaaactataaaatgataaaaacttagcttaataggatggagagattggaatgtttgaaaagatagcacaaagtagtaaatttataaattctaaaagtaatataaaacctaagattggtttgatattaggttctggactaggtgatttagcaaatgatatagaagaccctgtcacaattaaatatagtgaaattccaaacttccctgtatcaacagtagcaggacatgctggacaacttgtaattggaaaacttgaaggaaaagaagttattgctatgcaaggtagatttcattactatgaaggatattctcagaaagaagctacttttccagtaagggttatgaaagaattaggagtcgagattcttatagtaactaacgctgctggaggcgtaaataaagaatttaaagcaggagatttgatgcttataagagaccatataaactttagtggaagtaatccattagtaggaaaaaatgatgacagatttggtgctagatttccagatatgtcagatgcatattcttctaaatatgtagatgtagttaaaaactgcgctaaagaatgtaatatagatgtcaaagaaggcgtttatatgttttttagtggtccaaactatgaaacaccagcagaagtgagaatggcacaaattttgggagctgatgctgtaggtatgtctactgttccagaagtcatagtagcttctcactccaatataggagttattggtatatcttgtataacaaatatggctgctggcatcttaaatcaaccactaagtcatgaggaagtaatagaaactactcaaaaagttaaatcagaatttatgaatttagttaaaacaacggttaaaaatttataagttaaagcttattatatattttttgaggaagtttataataaaatagttaatgtttaatttgaaaagaattaataaaaagctgtcttgatatagaaagttatttctaataaaggacagtttttttataatactacaacatttgaaagtgttttaaagtttaatatttatttaaattattatagattagaatggagatttcaattatgagaatgtatgatattataaaaaaaaagagagataacttagagcttagtaaaaaagagataaactactttatagaaaactattcaaagggagatatacctgactatcaagcttctgcactattaatgtcgatttatttaaataagatgaataaacaggaaactgtacatcttacagaagcaatgatgaactctggagacatgataaacctgtctgaggtagatggaataaaggtagataagcatagtactggtggtgttggagataagactaccatagctcttatacctttggttgcttcatgtggagcaccagttgcaaagatgtcaggtagaggtcttggtcatactggtggtactattgataaattggagtctataccaggtttttcgacagaaatggagataagtaaatttattgattctgtaaataagtctaaaatagcagtttgtggtcaaagtgcaaaggtagcaattgcagataagaaaatatatgctcttagagatgttacagcaactgttgataatatatcattgatatcatcaagtgtaatgtctaaaaagttagcttcaggagctgatgcaattgtgttagatgtaaaaactggtgatggagcatttatgaagacattagaagagtcttttgagttagctaaatctatggttgatataggtactggtatgaatagagatacaatagggattgtaacagatatggatgaacctttaggttttgcagtgggaaactctttagaagttatagaagcaattgagacattaaaaggaaatggccctaaagaccttgttgagctatgtgaagtattaggagcatatatgttggttttatcaaaggtagcacatgattttgaagatggtgttgaaaagataagagaatcaataaaatctggtactgctatacaaaaactcaaagagtttatagagaatcaaggtggtaataaagatgtagtagatgattattctttattcaaaaaatcaaagtataaatatccagttaaatcaattaaatcaggttatataagtaaaattaaagctgaagatgttggtgtatcagctatgattcttggagcaggtagagaaactaaagatgatattttagatttatcagcagggataattttagaaaagaaagtaggagattatgtaaatgaaggtgaagttttagcttacatgtattataatgatgaacaaaagctttcattggcaaagggaagatttattgattcctactctattgtagattcaaaaatagaaaaaaataaattaatatatggtattgtaactaaagaagagattaaaaagttttagaaaattttagaaaagtgattataaaaggcctaacatgtcaaaaataatgttaggttttttattttttgataaactataaattataccaaaaatatatattttaaaacattttttacaatataaataagtttattctacaagatgattgaaaattaaagtatctagttttataatagaaaatggataaatatacataaggagtagattatattatgaactttaaagaaaatagattgaaaatagcagtattaataattgttattttgattatcttagcaggtatatttgtgtttatacaaataggtccttatgataaaaataacaaaaaagatgtaattattgacgttccaagtggagcatctgttggaaaaatatctgacatattatatgaaaataaattaataaagaatgaactattatttaaacttttggtaaaggttagcaataaagctccgtctataaaatcaggaacatacttacttaatcaatcgtattcaaacaatgatataataagtcttttagtttcaggtaaaatatatcaggatggtataaaagtgactattccagagggagctacatctaaagaaattatagcaatgttagtaagtaaaaatttaggagataaagctacttttgaaaatttaataaaaaaacctcaagaattttatgataaatttccatatttgaaggaagatggaataacctctttagaagggttcttgtatccagaaacttattattttaattcaaagaaacaatcagaagaagatattttaagcgaaatgttaaaagtatttgacagtaaatacacggacaagtttaaaaagaaacaaaaagaattaaatatgactcttcaagaagtaatggaaatggcatcaataattgagaaagaagctgttcttgacaaagacagacctataatagcaagtgtgttttataatagacttaaggtaggtatgcctcttcaatcagatgctacaatacaatatatatttgaagagagaaagaaaattgtaacatatgatgatttaaaaattgattcaccatataatagttataaaaataagggattacctcctacaccaatatcaaatcctggtataaaatctattgaagcagcattatatccagagaaaacagactatttatattttgtagctaagattgatggtggaaataattatagtacaaactatcaagaccatttaaaatacgttaaagaatataaagaagcaagggataaacaatcaaaagatacaaaagcaacaaataaagaaaatacaaaaaaataaaccatgattataaaaagtctaacagggtaagaataatgttgggcttttttattgaaaattgttattcttagatttataataaagaaagtgtaaatatatataacaatatgaatttaaaaaataataaattaatataaaacttgaatatttattattttagggagtgtttttatgagtaatatagttaatgatttggttgaagattatataagagtgacattaaaagaaaaagaaggatttttaaaagatttagaaatttatgcagaggaaaatagtgttcctataatacataaagaagtttcagatttattaaaagtcttgttaaaggttcaaaaaccaaagagaattttagaagtaggatgtgcaattggttattcttctattttttttgcaagtattataggaaaagatgcagatataataactgttgagagaaatgaaaaaatgatagaaaaagcaaaagaaaacataaaattagctggatttgacaataacataactatactagaaggagatgcagaagaaaaacttagtcaagtccaaggtgaatttgaccttatatttatagatgcagccaaaggtcaatataagctattttttgatttagttatagataaattaaaagatgggggacttttagtatctgataatattttgtataaaggtatggttgctcatgatgattttgttgtaagaagaaaaaagactatagttaaaagaatgagaaattatttagattatatatgtaattgtgactatttaagcacatcattggtaccaataggtgatggtgtagcactaagttataaagaaagtaaaagaggtgatgtagatggaattaaataaagtagaacttttagctccagcaggtgatttggagagattgaaaatagctataacatatggagcagatgccgtttatataggtggagaaatttttggaatgaggtctgcagcgaagaattttagtaaggaagatatggcagagggagtagcttttgcacatgaaagaggcaagaaagtattcgtaacagtaaatataatacctcataatgaagattttctacaattagaagactatttgttggaactagaagagataggaatagatgcagttataatagctgacccaggagtgcttagtgtcattaaaaaagtaattccgaatatggaaatacatttaagtacacaagcaaatacaaccaattatctaagtgcaaacttctggtacgagcatggaataaaaagagttgtagtggcaagagaattatcttttgatgaaatatctgagataagagcaaaaacacctttagatatggatatagaagcgtttatgcatggtgctatgtgtatttcttattctggtagatgtttaataagcaactatatgactggaagagatgcaaacaaaggttcttgtgctcaatcttgtagatggcaatatcatttggtggaagaaaaaagacctggtgagtattttccaatatacgaagatgaaaggggtacattcttctttaactcaaaagatttatgtatgatagagtatataccagagttaatcaaatctggtataacaagtttaaaaatagaaggtagaatgaagactgcatactatgtagctactgttgtaagagcatacagaatggcaatagatgaattttacagagccccagaaaactggaagttcaatccaatgtggatggaagaactaaaaaaaggtagtcatagacattttacatcaggtttttacttgaataaaccaacaacagaagaccaaaattatcaatcagcatcatatgttagaaactatgattttataggtatagttagagaaacagaagatgaagatggtcttattgttgttgagcaaagaaataaaatgtgtgttggtgatgaaatagaagttatgggaccatataaagaaactatgtttactaaaattgaagaaatgtacaatgaagaaggagaagctatagaatcagctcctcatcctagacaaatagtgaagttaaagctatcagtaaaagttggtaaagattatatgcttagaaaagttatagaagaaaaggttgaagaataataaaaaattgataaaaatagtattagccccttagaaattgtcaataatgaaattatctaaggggtgatttcatgtcaaaaaagaagactccatttttgaaaaaagtgggaaagagaagctggtgtatatttactataattttaataatttatagtgttttaatttataggctagttgatatacaagtattaaaaggtgataaatacaaacaaagtgttgaatcacaaagcgttgagaaagtcgagttaaatagtggaagaggaataatctatgatagaaacaacaagaagcttacagatacaagtaaatctcaggtattaattgttgaaaaagaaaaattaaataataactataaaattttggaacttattaagaaagctactaagatgaatgatttagatatatataaagctgtacaagagcaattgacacgccctataatacagattcagactaaaaatatcgataagagtatgaaaaaagaacttgagaaaaatggaataatggtagaagaaaaaactatgaggtacgcaaaagatggtttattatcacatacaataggatatataaaagaagatgataaatcaggtcaatcaggaattgaaaagagtatggatagtgtacttagaaattcaaatgaaaagtatataagtgcttttaaagctggagatgcaggaaatgaaaaatctctaaacatactaaagggaagtgtaaaaactgttgataataaggataaagatagacatctaaaaactactattgattataacattcaaaaaaaattagaacaaatactaaataaagaagaaaatcctacagcagcaataatctcggaagcatctacaggtgaaattcttgcaatgtgctctagacctaattttgaccaaaatgacatatcaaaaagtttaaaaggaaaaaatggggaatttgaaaatagagttataaaagcgacatatccaccagggtctgtatttaagatggtagttttattttctgcacttgaaaatggtgttatagatgagaactatacttacaactgtacaggtaagactaaagttgggaatactaatgaaatactgcgatgtaataaaagagatggtcatggtttccaaaacttaagacaagctttttctaattcatgcaatcctgcatttttagatatagctatgaaacttggaaaagaaaagatactcaaatctgctgaaaaattacatttatttgaaaaggttgatattggtcttgatgaagaaaaaattagagaagctccaaaaaacatatcaataagaaatttagctataggtcaagaaaatatagaatttacaccacttcaaataaatcaaatgactcaaataatagctaataatggaacattcaaaccactatacttatataaaagtcttgtggacaataatatgaatacaataaaaacttataagtcttcaaaaaaagaagaacttatttctccttatgtgtgtacacaagttaaagaatatatgaagtctgtatctaggattggtacagctaaagacctaaaagatattgaaggtggttgtggagttaaaactggtacagctcaaagtagtttaaataaaaaagctatagaccacggatggataacaggattttatcctgaagaaagacctaagtatgtaataactgtgttagtagaaggaactcaaaaaggaaataaatctgcaacacctatatttaaggaaatatgtgaaagtataaaataaattatgtactataaaatttaaggatatatcgtaactttgattttagatagaaaactttgtctaatgatgtacgatatatccttttaaaatatagtattaactttcttgaacaagctctttttctagttttttaagagcttttttttcgattctagatacatatgaccttgatatatcgagtttttgtgcaatttctctttgtgtcttatagccataaggagttaacccatatcttaactggacaatttctctttctctaggagtaagaattttgtttagttgttcgtaaagttttccaacttgaacttttagttcaacttcatcaagaacatagttagcctctgtgccaagtatatctaaaagacttatttcattacacactactctttatatgttattggtattactggtcttcatgtaatttcaaatggaccattaattcaaaagaatctagtttttgttctttagacttataataaaccgctttatcaattacagattttaggagtttattttttccaagggaatctgaatcatggtaaagtgataacacagttttaatatcttctattattttagaattgtcttttttaacagtactcaatctattttttactgtcttaattgaatctttaatttcttcagttcttgaacttatattgttggacctttcaataaatgtatcttcatcatatattcctcgttctagtaaatcatataacttatttttttgcttgcctaattcttttaactcagtttctaagccctttaagactcgtttttgaaattctatattactatctttattatttttatctaaatctaaatcagatgattttaattgatatttttttacagtgtcttccaaagattttaaaatggcagcttcaataaattcaaatcgagaacttttattgcaaccaggatggtaacaaattatatagtcgtggtctgcatatggtctatatactaatggtctaccacaatttttgcaaatcactattcctgcaagtggattttttatttgattaccatagctgacatgaccattttttttgagtatattttgagcttttttccatgttatttcacttattaaaggttcatgctttccttttgcttcaatccattcatctttaggtcttagtttaactgtttttattttatttggatttttagattttttgtagtcctttttttgccactgaatgtagccacaatataccttattttttattatatttgtaattgcagaattgtaccaattagcacctgtagcagttttaatgcctaagttatttaggtattttgatattttactacaacccatatcttcattaatatataagtcaaagatagtcctaactacatcagcatctttatttggtacaagtattctttcttttctaccagttgttacagcatcatatccaaatggagcagaggttcctatgaaattcccttcttcaactgattttattctacctctttgcatccttcttgatataagttttaattcttttcttgccataaatgcttcaaattctgaatactcctcatcaaattcatctgttaggtcgtatgtttttctaggtgtgatgattttggttttactttctttgaatgtttctaatatgataccttggtctttcatgtctccacgaccaagtctgtctaagtccattactaagactgcatcatatttattttcttcaacttcttttagaagttcaagcattttgggtctatgtattatactttcaccagaaactaattcttcttttatttcaattacatctaagttttgttcttttgctagttttagtagggttgatttatgtctacttaaagtttcaaattcgccttgtttttctgcctcttcatcagcacgggattttcttaagtatatagcaacactcatatagataatcacactccttatgcactattatatattataatttggagttttaataatatttttataaaaataagtacatttttatatgtacttatattaattataatagaatttaaacaagtgtttttaattatataatttaccataatatgttataatatttttagcaagaataataatctaaagtggcaagcatgtcagctggtgttatatcagtttatatttatgataaaataaaaatctcccaaacgccaataaggatgatttaaaaaaataatattttcacttaaaaataatcactttttataggagtaaattattttcttgattttattgtactacaaattggtacagatatttaaaaataatatattcataatattataaatagttttgcagtgagcgatatttttgataaaataggggttaacagttgaaacataaggcattgagggtatatgataaatattatcatttgcactactcgtggttcactgcaaatttgagagaattgtatagatgtaagtgttggaaatactcaatttattttggggttttatattaactaagtggaatgtaaatttgtttcccacagatgtaatgacaaatatatctcctagttttatattaactaagtggaatgtaaatttgcgcatgaaataagaacatctaaagacaaaatatagttttatattaactaagtggaatgtaaatatattttcttttgtactttgagatttaagtcttaatcgttttagattaactatatggaatgtaaatcatacacttttttaaatgcagcactaccaaagcgatggttttagattaactatatggaatgtaaatattgcaatgcttcatcaactattacacatagtatcttgttttacattaactaagtggtatgtaaatattttattagcttgtcattttatagattaagggttgagttttatattgactatgtgtacaagaatagagtagtttgaactactctattttttatttaaaagtatattttacattaattttcttcttcttaactcttcttcacaataatatcgacacaattctaaaaaatctatttctaaagcaagtgataaatctatgattgtagaaatattaatatttttgtatctcttattttccaaatcagaaatatatgctctactataattcgctttttctgctaattcgttttgagtcatacctctttcttttcttagtttttttagcatatataaaatctccttttatcaaattttatataagataatatttgtagaattataaaatatatgatggtattagcgtcattattttatggaaatttatggtagaatatagttaagaatattaagaaaatttattttgaaggtctataaataccgaccaaataatttgtaaaaacaatgtaaaaataatgtgaaaaattgtaagaaaaaaatcaaaaataaaatgatttatttttagaaaatcatgtttagtcatttttagcgttatacaacattaatgtttattaacgagtattaaatagtactagtttatttaaaatcaaaactaaaatgaagaggtgtagagtttttttgtgggttgcaggaatttttggaagtctatataatatatttacaaagtaattcttagaaagttagtaaaaatatatttgttgaaataaatttactagagttgtaaatggggggattttcatacctatttttacgaacgtaagttcttaaaatcttaatatttattaattttagatgaaaataggagatataaagcgtttaaagaagataagagaataaaaaataaatatatagggagatgctttaagtgaaaatataaataatgtactaaatttatacaaataaggaaataacatatagtgtatttaaaaataaaaaggctggtggtgtttaatttgaagtatttttaagtgtatatttataatataaggggaatttttatatttatgaatggaggaatgtagtaatggatgaagaaagaaaaaaattaattgatgatgcagaaaaactagcaaacataggaataaatcaaattttaaagtttagagattcattagatatagaaaatataaaatatataaatatagttgcaacaaatttaaagccaaacataaaaaaatagccacccttttgggtggttttattgtgtcatatttttcattaagtttatgagaaattctttttgctcatcacttaatttgctaaaagtaaataatatatttttcataaacttatcgtcttcatttataatgtcagttgctatttttagaactttttcattttcagagaactctataaacatttctcctttaccagtttctaaccattctttattaacattatatatgtcgcaaatatcagagataacacgctctgtaggatttactttaccagtttcaatgtttccataatttgagcgacttatttttattgatttagctacttcttcttgtgtatgtcctaaagtttttcgcaattctattaatctttttattttttctttttcctccatgtttacatatcgcctcttttctttaataagataataacattaaatattaatgtttgcaacaagcaaatttattttttaaaatgcttgacacggtatataaaaagagatacaatgattgtaacaagcaaggaggtgctgaaatgaaaacacaaaaaactactcatcatttaaataatttaaatttggatgatgatgatagaaagcttattcaaatgactcttttgtttaaaaaattaaatttagaacaacaaaattatatctctgcaatggcagatggtatgaaagtatcaaatgagcttttagaaaaatcaactataaataattaagggggaaagaatttatgagtaataacttaatggtatttgaaggaaaagaagtagaagtgtttgagtttgaaggtcagattttatttaacccaaaacatgttgcagagtgcttagatataaaaaatgtaaatgaaaatttgagaaatatgaataataaacaagtaattaagttaactaattctaaaatcagtagtactgactttagaaaactacacaatacaggagaaaattttcttactgaaagtggtgtgtataagttaatctttaaatcaagaaaagaagaagcagagagatttcaagattgggttactgatgaagttttaccatcgataagaaaaacaggtacatacagcactaaatctaaagatgaatcagaaataaaatacatgaatgctcaagcaagattaaaaaatgcaagagcaagagaagcaaaaatatatctgaaattagctgacaaagtatcacaagctggtataccagaatttgctcaagtaatgtactcaaagactactgaacttatttctggagaagcattaatacctttacctaagagggagaaaaaaacttattcagctacagagataggtaagatattaggaatttcagctaataaagttggaggattagcaaatgcttataatctgaaaacagatgaatatggaattaaggtatgggataaagctaaatattcagataaacaagtacctaattttagatattatgagaatataataccagttttagaaaaagctttaaatgcttttgaaaactaaattgaactgtcttagatacggatattagaaaactaaatttaaggaggaataagaaaatgaaagaaaataatagaatagtgagtgctataaatgaggatatagtaggtattacagttgatggagagatagacttaacagataaggaattagaaatggtaaacaattttaagaaagttatgaatagcattaacaataaaataggtattgattctgggatttcacttagtgataacgagatagaaaataataaagatatgatatacaagattgcttcaaaagtggcatggcattataagaaaatgaactttgaacacttagaaatggatgaaaaactctttgatgattttacttttgagtttatgttaaagttctttggtgatatggaagaatatgaattaataaaatatcttacttatataggagaagaaagtaacgaattgagtgatagagaaaggatattttataaaatagtagatacacttgatacaatagctgatattaaaatatcagaccaaaataagatagaaaaaaaagttggtatgtgtataggtgaagataattatataacttattgtatagatgaagacttaataaaattttacattaaagatgaagaagaactagttataaataaaaatagccctctgctatatatgttagacacactattttatgaagtacatgaagagtaaaaattgcaataattaaataagtataagacaagtttatgagctcatattttataacaaggggtgatgttatgaaaatactacaacaatttaaaccatacaaatatgatgaagagaaaaacatagaatatgatgaaaaaattatagctaatcaaaacacagaagtttatatagtatatccacgtatatctgatgaagagaataggaggagatggaaagagtttgatgaagtagccaaagaagtagctattaatatagcaatgaagaaagctgagacagtagaaagttaagaaagtagagaagttgctaatacttagcactttctcaaagaagaaaattggacaactatttttaaacaactaggaataaataagcgatagtatgtttgaaagaaggtgatgaaattgcttagtcttgatattagtaagaaaaatgtgatgactcttaaaaaagatggtaagtttttagcagatatagtatttaaggacattaaaactggtaaaaaaatatcagttggaacattaaataaaaaaagtgctggtcaaagtaaccaacacaataaataaaaaaagttaataaaattataacataaaaaggagagatttaaaatggttgaagttaatataaaaattaaaggcgaagcaagtgaaataattgactcaattagagctatatttaatagctttggtgaagattcaatgacagagataaaagcagagcaagaatataaaagtagacgtagtagaaagttaaaaacagaagatttatcagaccaggaataaagaaggtgatataagttgcaactatataagcatcaagaggaagctttaaagctaacagaatataataataaatgtgcatactaccttgacatggggcttggtaaaacatttgtaggaagtgagaaattaataaatctaggaagtaatacaaatttattaatctgtcagaaatcaaaaattgacgattgggtacatcactttaaaacatattatccagatatggggataatcaatggtacaaagaaacttagtgaaggcatagagtattttaagattgttgaagttccatttatagtagtaattaattatgaattagcttttagaagaaaagagttattagatttaaaagattttactttaatgttagatgaatcatcaatgattcaaaatgaaaaagctaaaagaagtaagtttgtactaagtttaaaccctaaaaatgtgatactactttctggtactccatgtagtggaaaatatgagcaactatattctcaaattaaactactagggtggaatatatcaaaagatttatattggaagcaatatattgatgttgagtacaaagatattggtggttttccaatgaaggttgtaacaggttataagaatgttgacagattaaaaaagaagttaagagattatggagcagtatttatgatgtcagatgaagtatttgacttaccaaaacagatagataatgtaatgaaaattagtactacaagagagtataggaagtttaaaaaagattcaattataagtatttcagatgatattgaacttgtgggagatactacactaactaaaatgttatatgaaagacaattatgtagtcaatacaataaatttaaattagaagcttttggagacttaataaactcaacaagtgacagattaatagtattttacaattttaacgaagagttagacagattaatagaattatcaagagatagaccaatatcaatagtaaatggttctataaaagatttaagcaattatgaggaatataataactcaattacatttgtacaatatcaagcaggagctatgggtttaaatcttcaaaagtgtaataagattgtatattttagtcttactttatcttgtgaattgtttatgcaaagtaaaaagagagttcatagaataggtcaagaaaacacatgtttttattattatatgatttgtaggaatagtgttgaagaaaatatatataaaagcttacaaagtggtgttgactatacaaataatttgtttgagagaggagagtaatccttgggtgcagaaaaacaatttgaaaataaagttaaaaagtttttaaaagagcaaggttgttggtttattaaatattggggaggttcagcatatacaaaaagtggtataccagatttattagtttgttgtagtggtaaatttataggtattgaagtcaagggggaaaaaggaaaagcaagcgaactacaaaagtataatattaaagaaattgaaaaggcaggtggaataggaattattctataccctaaagactttgatagatttaaaaagatgattttagaaataaagaaagaaggtgagtaaatgcagttctcacatagtaggataggagtatttaagagttgcccatataagtataagttacaatatattgacaaggtgaaaacaatattaaatgcagattctaacaatgctttaatattaggaacatcacttcatactggtattgaaaaagatattgatgcagcagtaaaagaatattattttagttatccaagtataacagatttacacattaatgaagtgatgaagttagattatttaataccaaaagtaaaagaaattttaccaaaagggtttaatgaggttaaaataacaactagtgattttatagggtttatagatttgttaacaccacatgtatatatgactgatacaaacttaaatacaaatgaaacaaccatatattatgaagatgaagaaagagtatttgatatttatgactttaaatattcaaacaacatagatagatatttagaaagtgagcaacttcatctatataagtatttttatgaaaagcaacatccaaatcatgagataaaagatttgtactatgtatttgtacctaaaattcagattagacagaagaaaacagaaaacttacatcaatttagacaaagattacttaatgagcttgataaatctgaaataaaaatagtgaaggttgagtacgacccaaataaagttattaatttccttgtagatataaaaagatgtcttgaaaacaaggaatttgaaaaaaatcaaaataaattatgtaactggtgtgactaccaagaatactgtgaaaaggggattgattatatgttattaccaaatagtgaaagaagaagtgtggaaggaattaataaaaaaactttatggatttatggagcaccatttagtggcaaaactacattagcaaatgattttgaaaagcctttaatgcttaatacagatggaaatataaagtttgttgatgctccatacatttctataaaagatattgtaacagttgaagggagaatgacaaagagacaacttgcatgggatgtatttaaagaagctataagagaattagagaaaaaagaaaatgattttgaaacaataattgttgacttgttagaagatacatacgaagcttgtcgcctttacatgtatgacaagatgggaataactcatgagtcagatgatagttttagagcatgggataaggttagaacggagtttttaagcactataaaacgacttatgaaccttgactataaaaacataatattaatatcacatgaggatacatcaaaagatattaccaaaaaaggtggtgacaagataacagcaatcaaacctaatttacaagaaaaagcagcaaataaaatagcaggtatggttgatatagttgcaagagtagtagctgatggagacgttagaacattatcatttaagactaatgaagtgatatttggagggggtagattaaaagtaaaatctaatgaaattccacttgattataatgaattaatgaaagtatatgatgatattagtatagagaaaaaagacgttaagaagtcaagtaagactaaaaaatctaatgctgaggaagaagtagaaatgattcctatagcagaagaaataagtgagaaaactgaaaaagaacaaacagaggaagaagtaattgaacaagaagaagcaattaaaccagtcaagaaaactagaaaaaagagaagttagtttaagtgattatataagaaagatgattaattaaaaatttaaaagaaaaggatggtatgtgatatggattttagtaaatttgataaagcaatagatgtaaaaggattaaaagaagatataaaagaagcatctgaaaatagtggtaaatttaaagatgtgccgcatggcacttatgaagtagaaataaataaaatggagttaagtgaatctaaaaaaggtgacccaatgtttgtatgttggtttaaaatactagaaggagagtataaagattcattaatgttcatgaatcaagtagttaagcaaggttttcaaattcatatagtaaatgaatttttaagaagtttagaaactgatattgaagttgaatttgaatcatacagccaatatgcacaactcataatggatatagctgaggaaatagatggagagcttgaatttgctattgaatatggtgagaagaaaggttttaatacctttacaataaaagacatatttgaagtagcttagaaactttattacagctaggtgtatacatgcatctagctgtaatattaaaaaggtaggtaattaatatgagagtaaaaagaaaagatggaacttataagcccaggtaaaattgtaagatgtgtttggtgtggaaaaagattttacaagttagataactctaaagtcatatattgtagtagaaaatgtgcagcaaaagcgagaggggtgttctaaatgattttttatgattttgaagtattctcttatgactggttagttgtatttatagatgttctaaataaaaaagaagaagttattgtaaatgatatagataagttaaattcattttatatagagcatagagaagatatttttattggttacaacagtagacattatgaccaatatatttttaaaggactattatgtggatttaatgcaaaagaaataaatgattatattattgttaaaggtcaacctggttggaagttttcaaacttattaagaaacatacaaattaataactatgatgttatgactagttttcatggattaaaacaattagaaggttttcaaggtcatagtataaaagaatctaatgtatcatttaacattgatagaccattaactaatgatgaaatagaagaaactataaaatactgtagatatgatgtcgaacaaactatagatgtttttattgaaagaaaatccgaatttgaagcacatatgggattaattaaagcttttaaacttccagtatcatatattggtaaaactcaaacacaactaacagcaattatattagaagctacaaagaaagaacatgatgatgaatttgacttacaaataccagatactctaaaaattgagaaatataaggaagttttaagctggtataagaacccactaaatcatgactattctaaaaatctaaaaattaatatttctaatgtacctcacgtatttgcttggggtggtgttcatggagcaataccaaaatactatggtgaaggttattttttacatgtggatgttaattccttctatccaagtcttatgattagatataactatcattcaagaaatataaaaaatcctcaaaagtatgttgaaatttatgacaaaaacttacagttaaaaaaagaaaaatcacctctaagaccagcctacaaattggcagttaataaaacttatggaggaatgaaagataaaaacaataatttatatgacccaagacaggctaataatgtatgtgttagtggacagctgttattacttgatttaatagagaagttagaagggcattgtaaacttattcagagcaatacagatggattaattgtaaagttaaatacaatagatgattatgagttaatagatgatatatgttatgagtgggaacaaaggacaggcatgggtttaggttttgatgtatacactaaaatatttcaaaaggatgttaacaattatttagttataacagaagatggagaagttgaagcaaaaggattatatatcaaagatttaggaaatctagactatgatttaccaattataaataaagcacttaaaaattatatggtaaacaatacacctattgaagaaactataaataactgtaatgatttaatagagtttcaaaagatagtaaaaataagtagtaaatattcacatggtttatatagtccaactatagagggaaaaacaaaaaaagtatttattggcggtaagattttaaatgataaatgttttagagtatttgcttcaaaaaataaaaatgatggtggtatttataaagtcaaaaataaagaaaaaaatccagaaaaatttgctaatacaccagataaatgttttatagaaaatggaagtgttataggtaaaaaagtaccaaggaagctagataaaatttggtatatagatttagcaaatgaaagactcaaacagtttggagtattattaagtaattgaggtggtgattagtgagttttgacctatttaaaggatatatagttacaaataataaaaaggcagctgagaaatttaaaaatgtaaaaaagttaaaaacttatgaacagattaagaatttaccagagtttgcaggtgttttagcagaagaaactgtgttagttgatattgatgattttgaaagtagtgaaattctatacaaaatagtacaagatttaaagctaaaatgtagagtttacaagacaacacgaggtaagcattttctatttaaaaatactagtttagaaaagaatagaacaaaatgtagactagctataggtttaaattcagatataaaattaggatgtaaaaattcctattcaattttgaagttcaacaatattgaaagagaaattctatatgatagtaaagaaatacaagagataccagtgtatttagtaccaattaaaaatggaattgattttctaagtcttggagaaggtgatgggagaaatcaagcattatataactatattttaactctacagagtaatgattttactattgaggaaataagagaaacaataagagttattaataaatatgttttaaaaactccattacaagataatgagcttgaagtaattttgagagatgaatcttttcaaaagaagatattttttaattcaaaaggttcatttttatttgatgagtttgctaaatacataaaaaataataatcatgtaatcaagataaatgaccagttacatttatataaggatggtatttatgtagatggtcaagcaagaatagaagcagaaatgattaataatataagcaatttaaataaggctaagaggagtgaagtacttagttatttaaatttattaataagtgagaatacaagtatgtcagaagctaatttaatcgcttttaagaatggtatatataatatagttgatgattcttttatagaattttcaccagaatttatcataacaaataaagttaattggaattacaatccagtagcatattcaaagttagttgataaaactatgaataaattatcctgtggggattttgaaattagaatgttacttgaagaagtagtagggtactgcttttatagacgtaatgagcttagaaaagcttttatattaactggagataaagcaaatggtaaatctacttatctggatatgataaagacattattaggagatgaaaatacatcagcacttgatttaaaagagttgagtgatagatttaaaactgctgagttatttggaaaacttgctaatataggggatgatataggagatgaatttattgctaatcctgctatatttaaaaagttagtaagtggtgatagggtaaatgttgaaagaaaaggtcagaatccatttgattttaacaactatagtaagtttttattttcagctaataacatacctagaataaaagataagactggagcagtgcttgatagactaattattattccttttaatgctagcttctcagtaaatgataaggattttgacccttatataaagtacaaattaagagagcaagaagcaatagagtatttaataaacttagggttacaaggtttgaaaagggtattacaaaatagaaaatttacagtcccagataaggtcaagaaagaaatactagaatatgaagaagtcaataatcctattttaggattttttaaagaagttgataagatagaaaatgaatcaacaaaagaaatatataggaaatatcaagagtattgtatattaaatggattacagcctatatcaaacattgagttttcaagacaagtagtcaaaaagtttggatatgaagtaaaagataaaagaatacaaggtaagaaatataaagtatttactagagcagtcccgggatagtcccggatgtagtccctagatgtaatatagtaatttcaacgttgtcccggatgtccctagatgtttttgaccttttatatatttaactaaaaaatcatcaattttttgtgatgattttgctccctttatataaagaatatatatataatagtatgggactgaacaaaaattattgtctggatatattgaaatagctaggcttgaagcagtcccggatgtattttacatctgggactgggtttaattaagaagttatataatgtaaaaatatttaaaaaataagatagatttcattaataacctaataaaataattaaaaagaaaattctgttaatttgcaaggatgtgaaaatggagtgacagactatgaaaaattagaagaattgttaaattcatatagtaatttggatattgaaattagagaaatagagttaaaagtaagaggtagtagtttgagaggaatagagttaaatggaatgcctaaaggaaatgatgtttcttcaccaatcgaaaatgagttaatatatgttgaaagattggagaatgagaaaatatatctacaaattaaaaaagaatcaattaataatatgttaaatttattagatgattttgagaaaaatctaatagaactaaggtattttaaaaaattacaatataaacaaataagttatgaattaaatataagcgaattatatgtaggaaaaaagagaaaaaaagcactagataaaatacttccctttgctaaaaaatataatctaatatgaaagtcttgtttatgtccgattaatgaccgattaatgattgatttagtatagaaacatgtcacataaacatactatgagataagatataatggtagtatgaaacaagtgtataaatatatcccctaaaaaagactaagttatctcgacttggtcttttttatatttaaaacaaagtgaggtggtgatgtggctaaattaactgaaaaacaaaagcggttttgtgactattatattgagactggtaatgcaacagaagcagcaataagagcaggatatagtgaaaagacggctaaggtaataggtgctgagaacttaacaaaaccatacttaaaaagttacattgatgaaaaactaaaagaatttgagtcaaacaggatagcagacgcaaaagaagttatggagtatttaactaagatagtaagaaatgaagcaaaagaggaagtggttgtagtttctgaatatggtccagaaataataaaaaaagacgtaagtataagagataggaacaaagctgctgaattattaggtaagaggtataggttgttcaccgataaggtagaagttgaaggagctattcctatagttataactggagatgatgaaattgaagattaagaaaataaatatagcaaagctagtaggtaaggggtataaagactattggagatttaagggtcgttatagagtctgtaaaggttcaagagcttctaaaaaatcaaagacaacagctttatattatattactaagttaatgcaacatccagaagctaatttattagttgtgaggaaagtgtttggaacattaagagatagttgctataaggaactcaaatgggctatacatcagttaggagtagataattattgggatagtacaactaatccacttgaaattacatatattcctacaggacaaaagatatactttagaggatttgatgacccacttaaaattacctctattactgttgatgttggagtactttgctggtgttggattgaagaagcttacgagataacagatgaaaatagttttaatatgttagatgaaagtataagaggtaaagttccaagtggattattcaaacaaataacaatgacctttaatccttggaatgagcaccattggattaaaaaaagattttttgatacaaaggataaggatatactttcaaagactactaattatctttgcaatgaatttttagatgatgcagataagaaagtgtttgaaactatgaaaaagaacaatccaaggcgttacaaggtagcagggcttggtgattggggtattgttgatggattagtatatgaaaactgggaagagagagtatttaatatagacactcttatagagcagaatatcaaatcagcttttgggatggactttggttatactaacgacccaacaactttattttgtggtttagtgaatgaaccttcaaaagagatttatgtatttgatgaaatatataaacatggtatgtctaatgagagactttatagagaagttagtaggaaaggatattctaaagaacatataacagcagattcagcttctccaaaagatatagaccatctaagagagttagggttaagaaatataaaaggttcaagaaaaggaaaagacagtgtaaataatggcattcaatatatacaagattacaagattataatacatcctaaatgtgtaaactttttaactgaaataagtaattatacttgggataaagataaatttggaaataagattaataaacctatagatgattttaaccatttaatggatgctatgagatatgcactggaagatttcataaaaggagaggtgtttagttttgattaatcttttaagaaagggggtagctaaactgaataatattctaaataaaccactaaaacaatcagcaaacaatttaaaatatatagagtatgaaataaataaatggaaaacatcaaactctagaaaagagcagttacaaggtgataggtattataaaggtgagcacgatattttaagacggaaacgtactgttattggagaaggcggaaagttaacagaagttgaaaatctaccaaataataaaatagtagataataaatatgctaatttagtagaccaaaaggttaattatttgctaggtaaaccacttacctttcaaactgagaatgaaatatataattctttattaaaggatatatttaataagaagtttcttaggacctttaaaaatctttgtgaagattctctaaatggtggtatatcatggttacacccatactatagtgaagatggtaaactaagtttcaaaaggtttccgtcatatgaagtattacctttttggaaagattcagagcatacaatattagattttgcagttagattatatgaagtaaaatcatatagtggagcaaacgaaaagataattgagaaagtagaagtttactcaaaggaaggtatcaagagatatattttacaaggaatgactttgatagttgactcagaaagtccatactcttcttatttagtggttgagactgatgatattcatgaggaacttaattgggataggataccattaataccatttaagtacaacaataaagaaataccacttattaaaagagttaagagtttacaggatggtataaatattatgttgtctgattttgagaacaatatgcaagaagatgctagaaatacaatactggtacttcaaaattatgatggtcaaaatctaggagagtttagaaaaaatctagcacagtatggagctgttaaagttcgtactgtagatggggcagtaggagacttaaaaacactagagataaaagtaaattctgataactataaatctatattagaagtatttaaaaaggcattaattgaaaatggtagaggatatgatgctaaagatgatagaatgagtggaaatccaaatcaaatgaatatacaaagtatgtatagcgatatagatttagatgctaatggtatggaaactgaatttcaagcttcctttgaagaactattgtggtttgtaaatatgcaccttttaaatactggtcaaggaaattatgaaaatgaagaagtagaagtaatctttaatcgagatatattaataaatgaaacagaaagtatttctaactgtcaaaattcagttgggttattatcagatgaaactattatatcccagcatccttggactatagatgttaggcaggaactagaaaagaagaaaaagcaggaagaagctcaaagagagtatgatgatttaattcctaataatcaagatggtgttatagatgaaacataaagattattggagaaagagatttgaacaattagaagaagctcaaaataacaaaagtgtaaaatattatcttgaattagaaaagcaatataaactagctatgaatagcatagaaaaagatatacttgtatggtataacagatttgccaaaaatgaaagaatatctttattagaagctaagaaattattaaatacaagagagctagaagagtttaagtggagtgttgaggaatatgtccgatatggtaaagaaaatgctattaaccaaaagtggatgaaagagttagaaaatgctagtgcaagggttcatataacgaggcttgaagctttaaaactacaaatacaacaacaagtagaagtgctttatggaaatgaacttgatagcattgataggttaatgagagatatttatacaagtggatattatcacacagcttttaatgttcaacaaggaataaatgttggttggagcttaatgtctttagatactaataaaataaataaagttatttctaagccatggaccagtgatgggttaaatttctcagaaagaatttggggtaaacatagacctgctttaatcaatgagttacacactaaattaactcaatcaattattagaggtgagaatcctaaaaaattagtcaatgactttgctaaaagatttaatgtatctaaatctcaagctaagaatttaataatgactgaatcagctttctttgcatcagcttctaggaaagattgtttcaatgatttagatgtagagaaatatgagatagttgccacattagatttaaaaacatcaaatatctgtagagaactagatggtaaagtatttgatatgaaagattataaagttggaataatagctccaccatttcattgccactgtagaactacaacagctccttggttcgaggatgaagaaggttacagagcagcaaaaggagaagatggaaaaacatatgatgtaccatctagtatgaagtatgatgagtggtataagaaatatattgaagatagacttggaaaagaaaaagctgatactcttagaaaaatgcaactaaatgagaataaagatagaaaacaatttaaggaatataaaaaagtattagaaaatgaaataccttctaaatttgatgaataccaacatatgaagtataatgatactataaggtatgaggaagctaaaaagctttataaagatgtaaattggcaagttaagaatcagagaaatttaactagtggaagtgttcattcagtgccatttgaatcaaaaccaaatagtgtatttgataattacaaagatggtaaattaattcaaagaagatactatggtaatacaggaaaacctagattagatttagatttaactgaccatagaaacccaaagcaacataaaattgtacctcataaacatgattggttagctgatgaaaataaccatgataaggtaaaaagagagaaggatatggagcttacaaaggctcataaaatagctaacaaagatattttgaaaggagaataaaatggataataaatttaagaatttacaacatttaattgattctattgatttaggattagatgtagaatttgacttatataataaatcatataatatatctattggagatgatgatacaagatttattactctttgtcctgatggagatacaaagtattataaaaatggtaaagatatggttgataattgcaatattgatggtaaattactaaaggatttatggaaagatatacagatagtaaatatgtaaaggcacttacttaaatggtaaattagtaggtgcctttattatgtgaaaatttaaggaggaataaataatatggctaaatttgtgaagaaaccagttgaagtagaagcttttagattaggttatgatgatttaccaaaatggtttgttgggaatgatagagtttgtaattttatacaagaaaaatgtattggtggtaatgtgagttgtgacttagaaacattagaaggcactatgagagctaataaaggggattatatcatacaaggtgtaaaaggagaaatatatccttgtaaagcagatatatttgaaatgacatatcaaaaagttgaatataggggaaaaaataaattatcaacagagatgactttagattcaacaaactttcaagaaaatattaaaaatgccgcaaaggaattagagttttttatagaaactttagaaaaagcagatgataaaattgataaactaacagaaaaatgaataaatatgcttgtaaagttgatgtagataagattgtaaaacagttaatgaaacgcctaagagaagttattaaatagtttgaggagggttatattattgaaagagtatgtaatttggtttaagagtggaaattgtgtatctggaataacaaacgaagatgttactgataagttaatgaaagattttatggaagctgactcagattgtaggtatttgaaaggatatttagatgaagatggaacaataataatagatttatcacaaatagaagctatatcaataaatacttgtagtgataataataatattggttttagtaagtcctagatagggcttttttattttgtaaaaaatgaaaggagacatttaaaatggattggttaaaagaattgctagaaggaataaaaatagaggataacaagattgatgtagcttctttacaaaagtctatagaaaagaaaataaaagagactacagttaccaaagaagaatatacaaatcttgaaacacaacttaatacagctaatgaaactattgaaggttttaagggagttatgacaaaacaggaagttgaacaattaaaagcaacttatgaagctgaaataaaacagataaggagggattctattgatgaaagattactaatagaaaatagagcaagaaataaaaaagcaacaaaggcattacttgaagatattgaggaagaagattatgaaaagtatgagtctttaagattagcacagattaagaaactacaacaaagtgaagaaagtaagtttttatttgaagaagttcaagaaacaaaagtaaattttagaggagtaaatccaggagaaagtaatcctatagcagaaaaagcaccaaaagattttacttatgaagattggtgtaatcaattagaaaattaaagaaaagaggtaaataaatatggcaaatacaaaatttgacgcaaaatcatttaatgcagaagcatttggaaagtatatggagtcagctccaacattaaagagaaatgaattattaaaatcgagagctttaaaatcaaactcagaaattagaaacttatttagtagccaaacaactacatcatatggaagaatacctatgtatggtaacttagaaggggatgcacttaactatgatggtatgactgatataacagcagatactactgttacctatgaaagaggtgttgtagtagttggtagggctaaagcatggatggaaaaagattttagccaagatataacagcaggtgtagatttcatggctaatgtaagaaataaagtagcttcattttgggaggagattgaccaggatacattgttatcaatattaaaaggtatattctcaatgacaggaactgaaaataagaagtttgttgatgctcatacattagatataactaaaaatggtgatgggaaagtttctgctgaaagccttaatactactatacaaaaagcatgtggtgataataaaaataaatttagtctagctataatgcacagtagtgtagccactaatttagaaaatttaaatctactaacttatctaaaatatactgatgagcaagggatacaaagagatttaggtttagctacatggaatggtagaactgtattaattgatgatagtatgccagtagaagatgttgcagaaagtgcaagtggtgcagatgatggatatacaaaatatactacttatatattaggtgacggagcttttgattatgaagatataggagcaaaagttccttatgaaatggatagagaccctaaaacaaatggtggtcaagatactttatatactagacaaagaaaagtatttgcaccttgtggtatttcgtatgaaaagaaaaaacaagtttcattatctccaacaaaatcagaacttgaagatggttcaaactggactctagtaaatgatggagcaacaaccaaaacaaaatatatagaccataaatcaattgcaattgctcaaataatatcaaagggttaaattttatggaaaataatataattgatgatatagaaaaaagacttgaaagctttgaatatacattaaaagatggagataagtggttaataggttttgttaaagaaaagatagagaatataattaaacttgattgtaatataaatgaaattccaaaagaattaaaaaatattgaaatagatatgatagttggagagttcttatttactaagaagaatatgggtcaattagatatagaaagtctcaattttgaagttgtagaaaagtctatatcagaaggtgatacaaagatagacttttctataggaagtggctcacaaacacctgaacaacgctttgacacttttgtaaactatcttttgacttatggtaagaataaaatattaacttttaggtgtttaagatggtaagcaaatcaaggaaagcaatagaactgttatatagagataaatgcactatagtagagtaccaaccaattaaagaccctataagtaaaaggactagcaataaagaagtagttgtattagaaaatcaaccatgtaagctttcatataaaaatatagcttctgctacagatggaaaagtagctaaacttacacaaactattaaactctttatatctccaaacataagcgttaaagcaggttcaaaacttattataaatgataaagagtatgtaagaagtggagaatcagctatatatccaaatcatcaagaaataatacttgagttatttaaggataaagcataacggctagatggggcagtgttgattttagagagtttaaaagagtttgtaaaaagatggagaagcttacaaagattgatttagataagttttgcaaggatgcagcaagagaattagcagcacgattacttgggaaagtaattagaagaacaccagttgatacaggattcttaagacaaggatggaatggagtggcttatgctaggtcgcttcctgtgtataaacaaggaaataattatattatagaagttgttaatccgactgaatatgcaagttatgtaaatttcgggcatagaactaaagatggtaagggatgggttaaaggacaacatttcttaacaatttcagagatggaactacaaagccaagttgataagattatagagaaaaagttattaatattacttaaaggagtatttgatgcttaataatataattgatggaatatctattaaattagataaaacatttggagagagttatacaatttatagtgaagatgtggagcaaggtattaatgaaccttgtttttttattgttcctttaaatccaagcaagacaccatatccaagcgggagagaattaaagaaaaattcttttgatgtacattatttccctcgttcagaagataagaattttgaaataaatgagatagctgagatgctactggaggaattagagtatatagaaattgatggagatttagtcagaggtacaaatatgaattttgaaattatagacaatgttcttcacttctttgttgattataactattttactataaaaaataatgataccaataagatggatacagtagagttattcggtggtttgaagagaggtgataattttgagtaaagcattaagcaaagaagataactacaagtttactaaggagcagatagttaactctaagaagtatgtaaataaaaaagatttattaaatgcaattttaaaagaaaatgagttatattccttctcagaggtagaggatagaataaataaatttatgaaaggagtgagttagatggctttaggtggaggaacattcgtaacgcaaaataaaatacttcctggtgcatatataaattttatctcagctaagagggcaaccagttcattatcagatagaggtattgttgcaatgcctttagagttagattggggcatagatgaagaagtattccaagtaaccagtgatgattttgagaagtattcagtgaagtattttggatatgattatactcatgagaagctgaaaggtttgagagatttattcaaaaatataaggttgggatatttttataaattaaataaaggcgttaaagccagttgtactatagccacagcaaaatatagtggtatcagaggaaatgacttaaaagtaacagttacaacaaatatagatgataatgctaagtttgatgttgtaacacttttagataataagaaggtagatactcaaatagcaaaggttattacagacttacaagacaatgactatatcacttggaagaaggatgcaacactagaagcaagtgcaggacttgtatttactggtggaactaatggcgaagctgtgacaggagcagagtaccaagctttcttggataaaatagaaagctatagctttaatgctttaggatgtttggctacaacaacagaaattaaaagtttatttgtagaatttacaaggagaatgagagataaggtaggagctaagtttcaaacagtactatataagaaaagtgatgcagattatgaaggtgtagtgtctatagaaaataagattaaagataaagacttagttgaatctagcttaatttactgggctactggagcaatagcaggatgtgatataaataaatctaacactaacaagcgatatgatggtgagtttgatgttgatgttaattatacacaaatacaacttgaagaagctttaaaaactggtaaatttatatttcataaagttggtgatgaagttcatgtgttagaggacataaatacttttgtatcatttacagatgataaaaatgacgatttttcaagtaaccaaagtgttagagtacttgaccaaattgctaatgatatagcgactttatttaatacaaagtacttgggtgaagtaccaaatgataaatctggtcgtatctcgttttggaatgatgtagttaagcatcatgaacaactacaaaatatgagagcaatagaagatttcaaagctgatgatgtttctgtagaacctggaagcgataagaagactgttgtagtaagtgatgctgtaaaagttattagtgctatgagtaagctttatatgactgtttcagttagttaagagaggagtgtgataatagatgtctaaaaatattactatgaatgttagagatgcaataagtggttctaaagctgaatgttttgtaacaataaaaggtaaaagatataattttatgcaagctattaatttagaagctaaaatggaaaagaataaaagtgagatgccgattttaggtagcattacaaaaggaaacaaaagtacaggaagtaaattttcagggagtgcaacattttattataatacttctatttttagagagttgttatatgaatataaagaaacaggtgaagatatttactttgatatgcaaattaccaatgaagaccctacatcaagtgtaggaagacaaactataatacttgaagattgcaacctggatagtggaataattgctaagtttgatgctgatggcgagtatttggatgaggatgtagattttacttttgagaattggagaatagttgagaagttcaatatagcaaatggtatggaataagatacacatttataaattatagatgtgtattttttatttacaaaattaggagatgattaaaattaaagataaatatgagataaaagattcaatttcttttgattatagtaaaaaaagacctatagaagaatgtgttagtgaaatatataaaaaagcagggaaatatcttatagatattgctgataaactggcacttgatacaattgaaggttcatcattaaaaccaattacaataaaaatcaaactagatgaggatggcattgcaacaatagaaaaagaaacaaaatatttaatcatggaggtagaataatatgggagatttaaacgcttttttaagtcaaaatgcaataaaagtagagaatagaaagtatgtggcaagtgaaaggtttgtaggtgaagatggaaaaccagtagaatgggaacttaaagcaatagattcagatagagatagacagttaagaaaaaattctgctatcagagttcctgttataggaaaaaaaggaaaagctacaggacaatacactagtgaaacagattttaatacttacactttgaaattatgtgtggaaactatagtatttccggatttacatgatgcagaattacaaaatagttatggtgtaatgggggcagaggagttattaacaacaatgttgactcctggcgaatatacagacctttcaagtgaggtaggagaggtaaatggttttgatagaacttttgaagataaagtagaagaagcaaaaaactaattgaaggaggcgattatgatgctagtgtagctcattattgccttcataaattcaaatggaaaccacatgaatatacagatttaccagactacgagagggcatttgttgctgcttctatagatattaaagtagaagaagaaataaaagaagaaaagaagaatgctaaagaagctagaaggagtagaaggagataaaatataggtaaaatatgtaagaattatatgttataataattttagcaagaagatgtaatctacaatttatagagtggagttcatgtattaaaaaattatcctcccaacgataagaagggaggtgaatatacatggataattttttatttaatgtgttagctagtgtaacagctagttacatagtttatttgattagcaagttaatcaaaaaagtaaaaagccactctaccgcaaagagtgacttaaagattgatataaattttaaatatcatcgtaaaaaataactttcagttatagaacttcactctaccgcaaatagattgtagttcttcttgcttttattataccacaaattagaaaaaatatgcaaagtacttgttttaatagcaagtacttttttgtgtgaaaaagaaggtgattaaatgaataaagatatagaacttacagaaaaagatttatattgtattgctagacatattcaagtttatgtgtttaaaaaagatgatgaggtcataaaaaaggaagataatccatgttgcagatgtaaatatagatatgagtgttacaaaaataatgtttgtatttatcactgcaccacatttaagaagttatctaaaattacaggtcttaaaatgggtccaggaataaagatttagtacatttttagagccgccttaactaattcacaatcaaaagttccccaaaatggacattcatcagaacagggagaatctaagcgtatgaattttaaatctctttcagcaggagtaatacctatgccaggaatttcagaaaattcagcagttgccattatattttcatctgctactgaacagtactcataaatactttcaaataccatatattcaccatcctttcataattagtttagaagtatctaccaatacctcttgaattaattatagcatggtatattagggagatttgtttatattaagaataatatgtaaaaattttatgtttgtagtatatgaactaaataaaaaaaggaagcacttacttttggtaggtgttttttttatcgaaaggatgtgatgataatgtaaaaattttacttatatagtataataatcttataaaattattatattagggggatttattatgttttgttcaaattgtggtgcagaaattacaggtataggtaagttttgttcaagttgtggggttgctgtagaaaccgaaattattgaagataataatattaaatcaaatgatttaatcgttgatgctaatggaatagaaataaatatgactgaaatttatagaaaatatagaaaagaaaaagtaaatgcaataaaaaatgtaatggaaataagtggtttgaatataaaggaagcaaaaaaaatagtggattcttcctttgaagagttaaaaaacaattttattgatgatactatgagtaattcagaaaaggaaaaaataatacaaaatcaaaatagaaaaaataatattgaaaaagctcaacaagaatcagttgcttgttgccctaagtgtggttcaacatccttgacagctcaaaaaaaaggttttggtatagggaaagcagtagtaggagctagtctaactggtggtataggtttagtagctggaaatttaggagcaaagaaagttagagttacatgcttgaattgtgggaaacagttttgggcaggcaaaaaatagatgtattaattataaaaacacttactaatttagtaagtgtttttattatctaaattaacagaaaggagagtgaaaaaatggctacaatacagacatcaattcgcatatttgatggaatgacacctgtatttcggcatatgacaactgctatgaatatagtactgagttcatttgagcaattacaaagaacttctagtaatgcagtaaatactaatagcataataagagctagagaagaactagcaagagcagaagctggatttgatagattagaacgacaaataagagaatcagataatcaacagcgaaaacttaatgaggatataaataagggtgcaagttctacagatagattagttggaagtgcaaagaagctagcagcaacttatttaggtataagaacattaggaggtctaggaaatttaagcgaccagatgacaagtactaatgcgagacttggcatgataaatgatgggcaacaatcagatgctggacttaataaaatgatatttcaatcagctgaaaggtcaagagcatcttattttgatactgcaaagatagtttcacgaataggtatgaacgcaggtaaagcattctctagtactagagaaatagtaagctttgctgaacaacttaacaaaaagttcgtaatagcaggtgcaagtactgaggaaatgaattcggctcttttgcagttgactcaagggttaggaagtggagttttgcgtggagaagagttaaatgctgtgtttgagtcagcacctaacataatacaaagtatcgctgattacctcaacgtggatataggaaaaataaggagcatggcaagtgaaggtatgttaacagcagatattgtgaaaaattccttgcttgcagcagcagaacagactaacgcagaatttgagaagatgccttatacatttgggcagatttggacatcaataaaaaataatgcaattatgatatttggcgttatacaaaaaaagatagaacaatctatgtctagtaagggatttcgaacctttatagataattttatagatagtttatatattttaggtaatgtattttttaatatttttaatggaattataagcatattaggaagcccgttttttcaagcatttgtaaatgcgattattgtaggtgttagtttaatagtgcaggcactaggttggataataacacaggcattaaatattgctaatgtgtttgctcagaactggagtattattgcaccaatagtacttggagttgcggctgctatgttagtgtataacaatgcgttattacttagtattgcaaataaagttaaagatattgcactatctgccaaatctttagtcatgagctttgcacatatagtagcagagtcttatagagcagcagctttagtagcaactacaatagcacaagacggattaaatgcagcaatggcagcttgtcctattacttggattttatatggaattatagctatagttgctgccttttttgtagctatagcagtttttaatcattttgcaggcactagtgtatctgctataggggtagttgcaggtgcaatatcagttgcagcctctttcataggaaacttatttattgcaacagggaacttaattatagacattgtagctttaatatacaatactttagcaggttttgcagagttctttgctaattttttagatgacccaattggctctgttataagagcagtatctggaatggctaatgctgtattaggtattataagaagtatcgcaagtgcatttgatacagtttttggctcaaatttggcagatgcagtaagtggatggcaagatacattacaaggttggactgacaaagtagcaggagaagctaagataaaagttgaacgaatggaccctaataaactgcattttgacagatttaattatggaaaagcttgggatgcaggatataaatggggagataaactagaaactaatataaaagataaattcgatattagcaaaatagcagaaaaggcaaaaaaagatttaggattagacgacctttgggacaaaaaatatggtcttggcgattcaataggttctgcaggtcttaactctccactcagcgacgcagcaaaaggagcaaaagatacggcaggaaacacagcaaagatggcaaaaacaatggataaaagtcaagaagatttaaaatatcttagagatattgcagagcaagaaacaatcaatcgattcacaggagtaaacattaaaattgatatgaacaatacaaacaacataagtaaagatacagatgttgatggaatagtaaatgtactaactgaaaaattaaatgatgcaatggttgtttcagcagaaggaatagtttagagaggaggtgtaatcatggcttatgatttttacttggatggagtacaattaccaattacacctggcaaattagaaataaaaacaacaaataaaaataaaactgtagaccttataaatgatggagaagtaaacatattaaagactcctggtctatctgagataagttttgaagcagaatttacacataataaattaccattttgtagagggcaatttagagatgtacaattctttttaagtaaattagaactattaaaaacagattgtaagccatttcaatttattgtatctcgacaacttgggaataaagtactatttaatacaaatagaaaagtatcacttgaggaatataacatagtagaagatgcagaaaatggttcagattttaaggttgcaataaagttaaaacaatatagagattactcaactaaaaagttagttcttgcccctcctaaaaatgagactggtagacctaatgtaaagatagagccaaaacgagttgattcagtcaatgccacaaacactaaaacatatacagtaaaagcaggggatagcctttggtcaatttgtcagaaacaacttggtaatggttcattatataagaaggtatatgagttaaataaaacaatgatggataaagctaacaagggtaaaaaagtacctaaatataccatttataaagggcaggtgttaaaacttggctgatgaattagtgttagcaaatgatagagatataaggttagttattgcacattgggaggatttctacgaaccagttgtccttgatggaatcacatgggagatagaaagacgaggagtgccatctaaacttgaatttacaatagtaatggatgatatactacaattctgtgaaggcaactctgtaaggctgtattacaaaggtgtaggtatattctatggatatatatttcagaagaaaagagataaagaaaatcacattaaaattgttgcttacgaccagttaagatattttaaaaataaagatacttacgtatatagtaataaaactgcaagtgaacttgtaaaaatgttagctaaagattttaatttaaaatacaatgtcatagaagacactaagtataaaatctctaggatagaggagaataaaactttatttgatatgatactaactgcacttgatgatactttaagagagaaaaaagaaatgtataccttgtatgatgattttggaagaataacattaaagaatgttgcatcaatgaaactggatactgtcatgaacaatgatgtaattgaggattttgactataattcatcaatagatagtgatacttatacaaaaataaaactagtaagagacaacgaagagacaggtaaaagggatgtgtatattgcacaagattctacgcatatgagaagttggggaatacttcaaatgtttgatacagtagacaaaaacatgagtgaagcagagataaaacaaaaatgtgatatacttttaaaactatataataagaaaactaagtcgctaagtttaaaaaacgcaattggagatattagagtaagagcaggttgtttagtacctgtttttttgtcgttaggagatatagagttacaaaattatatgttagttgagaaagtaaaacatacatttgaaaataattcacatttcatggatttgactcttgttgatggagatgaatttgcttcttattcttcaagctcatatagtagtggaaatactaataataaagatgaaaagaaaaatggtcctgcacaaagtactacgaaaaaaaatacaggaagaaaagtaccagcattatttacagcatattatcctggacctggtatagaaggtggagataaagattgtactggaaaaaaattagttcctaaaaatcaaacttgtgcagctcctatggatgtaaagaaatattataaaagttggtatagtgaaaagtttttaaaggaccatccatttataaaactaaatgataaaatcaaagtaatattaccaggttcatctatagatggaaaaacttatacggttagagataatggaagtgctattaatatatcttcatcaggagtttatgacatagatatattaatgtctacagcaagtgaatgtaataggtttggcaaaagaaaagggtatataattataaatggagaggaagaagaaacttatcaaattcaaggtaataatcaagttagtaatacaaataacaactctaaagcagataaactaattagtgtagcaaaaagtaaactgggttgtaattatgtgtatggagcagaaggtcctaataattttgattgcagtgggtttactcaatggtgttataaacaaataggtataaaaattcctcgtactgcttctgcacaaagtaaagcaggaaaagcagtagatttaaaagatagaagtaagtggaaagcaggagacttattatgtagaattggtggaggaagtagtaatcatgttgtaatgtatattggaaacaatcaaataattcattcaccacaaacaggagatgtggtaaaaatagagtctgttaattcttatagaaaaggaaaagcgtacacacatgtaagaagatttatataagtgaggtgataaagtgtcacaagaattattacaagtaatcaagaaggctgcaatggatgcagtagaaacaagtaatccaatgactcttgcatttggaactatagaaagtgttaatcctttagtagttaagatagagcaaaaagcatcctttgaagaattttttttaatacagacagatacatttaaaagatatacagataaaaaagtaggagataagttagtattaattcgtatgcaaggagggcaacaatatttaatattagataggatgtgatgaagtgataccaagcgataatgttgactatgatattgaagatgtatcaattataaattttaatgtaagacaagaaccaagtaagacatttaaactgaatacagaaaagtctaagatagatggtatttgtgatgatgttgaagcattaaaacaggccatctttttaattttaaatactgaaaggtatgagcacctcatttattcttggaattatggagtcgagttaaacgaccttattggagaacctgtctcatatgtaatacccgaacttgaaagacgaatcaaagaagcactaattcaagatgatagggttgaaaatgtagataattttgagtttcaaaatgtaaagggtaaagtacattgtaagttcacagtttacagtaaatatggaaatataaaagcagagaaggtggtgagtgtataattgtttgagttaatgacatttgaaaatataattaaaagaatgttagatagtgtaccagatacttttgataaaagggaaggttctataatatataatgccttggcaccagttgctatagaacttacagaaacatacattgcaatggatgaattactagaccaaacattcgtagatactgctagttattactatttagagaagagatgtaaagagcgaggaattacacctttacctgcaaccaatacaattgcaaaaggagtttttaacatagatattccacttgattctaggtttaatctaggagaatataactatgtagcaattgagagaatatctgaaggtatatataagatgaaatgtgaaactgctggacctatttttgagttggggcaactaatacctattgaatatatagatggtcttgaaacagcagagttaacagaaatactgataaatggagaagatgaagaatcagaggacagtctaaggcaacgatattatgatagtttaaattctcaatcttttgggggtaatatacaaaactataaggatgaagttaataaattgcctgacgttgggggagttaaagtatatccagtttggaacggtggaggtactgttaagttagtaataattaattctaacttcaaagttccatctagtgatttagttaatttagttcaagaagaaattgaccctctacaaaaccaaggagaaggtcttggattagcaccaattggacaccgagtcacagttgaaggagttacaagtacaactataaatatatcagcagaaataacatataagagtggatatacatgggagaatataaaaacaattgcagaagaagcagttgatgactatttaaatgaacttaatatgagttgggaagatgaagaaaacttaatagtccgtatatctcagatagaaactcgtttgttaagtatagatggagtgttagatattacaaacacaatgataaatgatgttaaatctaatctaacaatagatagtaacagtatagtagtgagaggtgaggtagttggataaagagattaatctaataaattacttgccacaaattctacaagataaagaagaatatataaaagtatttaatgcagaaaacaaagaaataaaaacattacatgataaattaaaggacctatcaaatgaccagtttttagaggacctaactataagtggtataaaaagatgggaaaagataatgtctataactcctaaaagtaatgagagtttagaagatagaaggtttaggatttttagtaaatatataagtaaactaccttactcagagagatttttaaggaactggctagataatgtagttggagaaggcaattatgaattaactattaataatgctacttataacatacaccttgagagtgatgctagaaatcaagattggtttgaggaagttcattcttttgtaagtaatattaagccatgtaacatgacactagattacactagagtgcttataagcaaagacaattatatgaattttggtataacaaccttaatgggtcaagaaataactatatacccttggagtccaccagatatagaaacttatggagaaattgatgtattaactggcaatggagttggataccaagaggtaacaatattttaggaggtgatatattggctatagataaaagttattacactataattacagatgtaggaaaagcaaagatagcaaatgcaagtgtcacaggtaataaagtgggatttgtaaaaattcaacttggtgatggaggagggagtgaatatactccaactgagagtcagacagctctcaaaaatgtggtatgggaaggcaatatcggaaatacaactacagatgaaactgcaccaaattgtataatattagagagtttaataccatcaagtgtaggcgggtttatgataagagaaataggatatttagatgatgaaaataatttaattgccatttctaaatacaaagagtgttataaaccttctatagaacaaggtgcagtggtagacatgaaggttaaaactgtgcttattgtatctaatgtaaataatatagaacttaaaattgacccaacaataatctttgcaacactcaaagatatacaagacttagaaactaaaataagcaatgttaacactaaaatagatacaactaaaacagagttaacaagcaacatagaaactgctaagacagagttaaacaataaaataggtgatacaacacaacttactacaacagataaaacaaatatagtcagtgcaattaatgaggtaaagactagtgtagatagcatagaaacaacagcagagaaaacaagtataaaagatacagataatttatttgaaagtgataatgttgaaggagcattaaaagaagtgatgcaagaagtaaatgacaaaaagactaaaggtatcaaagcttttaataaacttgtagatatattataaaaaggagtgattaagtgacaattaataagctgccaaatagtgcgaacttaaatcaacttatgacttcatttgaaagtggagtgaatgaaattgagacaataaaaaatgaaattgctaatactttaatagcaaaaaagtttaatgtaacacaagaaaatacgttgagagaattgtctgaaaaaataaaaactatagaaactttagaagaaatggtaggagattctgatggggttacaatgtctaaggaatataattgtatttatcgtaattatacaagtagaacaataaatggtgtcaaaacatacggaacaaatcttactagtataaacattgatactgaatattctactgatatgaaaggtaaagtacgtttaagagatatagatagttcagaaaacttgttaataagtgttgataataaaaaacttatcaaacgaagttgttccaactcaggtaagtattgggagcataatctcaataataacattatggattgtgtaaatgtcgataaaagggataatagtataataatatgttattcctctgaaaggtgcatagaaaaattaaattcaaatggaggagtaatatggtcactaaatatagctggttctcaacctttattatgttgttctattgataaggagggatatatagcaactggaggatatgacaaaaaagttcaaagagtatctccaaatggaagtttgttatttgaatatgcaggttttacaaattatgtaacagcaatagcaacagatagtcaagggaatataattttaggtggatatggatatagaatcgacccacctaaaggtattcaaaaaatttctccacaaggagaattactttgggaatataattatctttctaaaacattaccaatttactcaattactgtagatagtcaagataatatttatgtatgtgattggactaatcacttagtaaaattatctaaagatggtaagtttatatggagtattagtattaataattcagagacttttggtagaacattaattgatagtaaagataatatatattatattgctaaacattttttttataaaatatctaatgattgtcagactatagaaaattttgcaacaagcgaaggaaaatttgtatttgttgagttaataactatagatgcaactcacgatgatagaatttggtgttttgattattcgggtgctaataattatttttatagatatagctatccaactgatttcacttcaacatcaacattagttttttcaaaaagttataaagctggacttaaatagaaaaattaacgaaaggaattttaaattatgatttatttaggaaatttactagacacaaaggaacaaaatataaaatatattggaatgatacactataaaccaagtgtattaggagaagaagacttaaaagagggcatcttagttgaggaattgccgacacaacaatatgcagagaataaagaggcaaagttatttataaatatagatactaaagaagttttctatagatatacagatattaaaagtagtatagaagataaagtaaattctacagaacaaacaatagcagatttaacatttcaattaatgaataatggggtgatatagtatgaattggtataagataataacagacttctacagaaatgggaactggactaaagaacaagttaaaatggcagttgcaaagaataagataacatcaatagaatataaagaaattgtaggagaggactatatagcatagtctttttttattcaaaaattaggaggcctacatgaatgaagaagttataaaagaaaaaataaaacgaaatgaaataagaataaacagacacagtgatgaaatagacgaattaaagatagcaaatatagagtctaaagcagagttaaaagcattgtgtgagaatttaaattcacttacaagcatgttgtggctaattggaacaatgattacaacactgataggattctttatatttgcagttcaaagaggaatattttaattaattaggaggataagagatggataatttaataagttttataccagagcagttgctaattttagtagctgctctctctattataggtaaaggttgtaaaaaatataaacaactagataataaatacattccaattatattacttgtgttgggaatcggattttctatttggatgctagggtttagtcctaacgcagtattacaaggtgtaatttgttggggtatatcaataggtataaatcaaacttacaaacagttgaaggatggtgaaaaataatgaaaatagcaatagtaccaggacacactttaagtggaaaaggaacaggagcaactggctatatagatgaaggaaaagaaaatagaatcttaactgatttaatagtaaaatggttgaaacaaggtggagctactgtatatactggaaaagtagataaatctaataactatttagcagaacaatgtgaaattgccaataggcaaaatgtagacttagcagtacaaatccatttcaacgcaaataaaacaactctaaatcctatgggtacagagacaatatacaaaactaacaatggtaaggtatatgctgaaagagtcaacaaaaaactatcaacaatatttaaaaatagaggtgcaaaatcagatgtaaggggcttgtattggcttagtcatacaaaagcaccagcaatattaattgaaacttgttttgtagatagtaaagctgatacagattattatattagacataaagatacagttgctaaattaatagcagaaggtattttaaataaaactatagataataaagagaatagcgaggggaaaatcatgtacaaacatacaatcgtttatgatggagcagttgacaaaatacctgcaactgtggttggctggggatataatgatggtaaaatactaatatgtgatataaaagattacatacctggccagacacaaaatctttatgtcatagggggtggagcatgtgaaaagataagttctattactaaagaacattatacaatgataaagggtaatgatagatttgatacactttacaaagcattggattttattgatagatagattaagatatttatttacactttacttacaatttcaatacaaaaggaacttaaatatatgatataactaagataagacatacttatgttaatttgattttaaatatacaaaatatacagatgaataggtatataaaataaataaatgaacaaaattatatataactaataaaatgtagttacatatttttattaaattgtttttgaaaaattaactttaagaatgtattaatatcataatgaatataaattgtattaaataaagagttattctatagattgcaaatgtaggttatatctaatataattagtgtataccataatttgtaatccgaaaaggaggaatttatggtagaaaagttaaagggggggaaatttatgtataaaatggaactattaaataacattaattatagtgttaagtatatacaagagattcctcagagtagtatcgctgagtatgaacaattttgtgagtggttaaatgataaatataaagatgataagagaaagataaacgaaaataatctagagtattttgatagttctttaaataagattaagattttactggagggaattaataaaaatataaagtctatagaaaagattataaatctaaataagatagattttgataataaagaacattttatagaacttttggaggatatgaaggatgagtatgaatttttgactgatactgattctactgactatgaacattttaaccgaatcatgtcttggtatagattgacaccagattatttggattcatcaataaaacatttagcaaacaataaagttgatttgaaaggtatagattttgatgaggtattaacttcagaacaatatagtgtaaaaataattgaagatgaactttaagggggatttaaaggaaaaatgatgcttaattgtagcgtgtgtaagaatatagaagactataagattatattgacatctttgaacataagtaataagttggtagaactgccagaaaaattatcagttggcattaaatttgaatttttagatttagaatttgaaaaagataaaataaaagtaccttttaatttagacataataggtatggataaagaggtagatgaagattttatagacaaaagtgacgatgatgtattatttaaaataaatttagtttataataatgtattatacttagaaaatgagattgagaataagacagatttaaataaagaattagaaaagtatgtttattttttacttgaaccaactttaaatgaaactatatcttcaatcggaaataaaattggaatcccaagcttaaggattccaaaaaggataaagtagtatgaagataactataagctataatcaaatcatttatcaagaagaacatattgtatttgaattgtctaatttaatattagataatccaaaattattaacagttttagctaacatatatatattgattggagaattaaaacaaaagaaaaatttagacaaagagaagcaaactaaaaatattgtaagacgtgttacaaaaaaagctcttttttctggttggataagcgaagaaatagggcaagattttattagatgttggaatgaaataagtagtgaaaatttaggaaaagtattagaacaaataatatcaagaattggaccttatgatgtagaaaaatttgaagattttcataaatcgatggaagtaaaagttactcagacaggtatgaaaaatgattttgatgtagttttttttgaaagagaatcaaatcattgttataaaaaaggagagtatatagatatatctggttatggtgagttccatgaatgtaaaaaaaatatctgtacatatatacctaaagacccgaagagtgatttagataagagagtatcaaataaattaaaatttataaaagccacatatgaattaaaaaaagataataagttttatatcccaactttttttcctatggttaagtcacaaagagaatttttaaaagattatttaaatggagaatacaattttatagaaatattggatatatatcaacttgaaaataaaattatgcttagttaaattaaagctatttctcagcttggtaaaatgtgagcttacaaagcacaacaaaattacataatattatattaagtaaaaggtggtaggaaaatcctatcaccttttttgattattaattatatcatggttttattataaataatttatatagttatatatttctttctaattagataatataatgctgttgttataatggctactaatattattgctaatattgtaatatctaatcttcttgtaaataagcctattgctatatactcaagacctgttacatagcgataaagtacttctagtttaacagtttttttcttatctatatttccatatattgattctaatttattaaaatattttttactacaaaaagcagttttaggtttaattaaatatattattgtagttcctattataactattattccaataagtataagattgatattcccaaaattcatagtaggatacctccttcataatttagcaaaatagagttaattttcttaatcaaagtatatcagcaatataagtataaagagtatctaaaatattacaaatattaacaggatacataaaactatagtataagttgtaataataaaacgaacgaaaatcatcatactaaaacataagaaaaattgtatcagatatatacattaacatacaccaaagcactcttataaaaagagtgcttattttttattaattatttttatatggaataaattggaatattatatttgttccaatctgattgattacatactattattagtataaaatttaattatacataaattggtaagaggtgtaaactaatgaagattaataaattaccacatgcggaactaaaactaatgaagtatatttggggagtagatgatgtattagcctcaagagatatcatagaaacaatgaagttgaaatacgattggaaaaagagtacaacattgacatttttaaaaaatttagtagataagggctttttaactactgataaggtagatagatgtacgcattatactatagctataaaagagaaagattatttaaaagttgagacaaagagtttctttagttttatgcataacaattcatttaagagttttatttcagcattacatgatgatgaagttttagatagtaaaagcttggacaaattagaagaatactttaaaaatttgaaagaagaagatattgatgactaataaagctatcagtatctttttagtttgagacaattgagagtagcgttttgatttaatgttagtgttatgtgatggtagaaaattatataaagaaaagtgattatttccttagtatttgatagtaaaaaatatagaaaataataccaactaaattttaaagaaagatatgaaatactacaatagcttaaatcatgcaaatatgataaagaaattgaaattataaaaggaatataattttagaagaaatagttgacagataaattaccttactatattattgtattaataaaataatacaataatatagtaaggaggtaataaatgaaatctagaaaacataatattacaaaaggattatttatagtttacataattgttttaacatggataatactattcaagttgcaatttgatatttcatcccttgaaaccatgaatcttagaagcataaacttagtaccttttgctgggtcacttataattaataatagagtagatatatcagagattatattaaatgtggttatatttgtaccatttgggatatatgtgtgtatgctaaaagaaaaatggagctttataaaaaaagttatacctatttttataactagtttagcatttgaaacacttcaatatatatttgcactaggtgcaagtgatataacggatttgataggaaatacactaggaggaatcataggaatagctgtttttatgctattatcgaaaatatttaagaataatgccataaaaattatcaatgtattggcattgattgtgacaattattgttgtattatttttaggattagttatttttgcaaacttatagaaataagtatatatgtttagcttaaaataaaatgtaagatacaattacatataaaattatttacacataaaaagcacctatacaggtgctttcctaaattattaaagaattattgtatcttgaaactcttgtatgttcaattcttgattttctcttgttttttctaataaatctaacgcacaatttatacaaactttaatttctgcattggtatttttctcataataagttatatatttatttctatatttatctatttcttttccacaacgactacacattacaattacgctcatatcttagttcctccatctctaattattcttaatatattcaatagtatcacttttctgaaaataatgattgttaaaactgtatcaaatttagatttactttttattataatgcattttaataaaaaaataaaggttatgagtaaaatatttatagaaaaaagtatattattgaatagattataaaattttattattttttatcagtcttaaatacacattaatatctataaaatgacaaaataaaaaatactatttaaatagatattaaaaaagtgataccaagtatttgtttgctatatgaataacaatttatttaggagctttactttgacactgtataataataaagtaattgctaaaaacgttggatgatttggatgtatttttagaaattagaaaaatatatacttactgactaatgataatcttatatgtattttagtttgagtgatttaagaaaagtgttttgaaaagggattattttatagagtaaataaatatatatatggtagaaaaattacatataaaaagtagagtttatttcattaccttctttatctgttccgatggggtcttgtagagatacttgagttttattttttttgttagatctaatattcattaaaatctcattttcaatacatctagaagcatatgttgctaatcgagttcccttatctatgttataagtttctatagctttaattaatcctattgtacctatggatattaaatcatcctgatcttccgttgaattattatatttctttgctatataagctactaatctcatgtttctttcaattaatgtatcttttgcacttttatcgttttctattttaaatttagttaaatactcaatctcttcttcaggggttaagggtttttcaaaagatttaagagctgccaataggtcacccccttttcaacggtcactttaaattatatgaaggagacttatccaagttgactgttatctaataaaataatatgcatatttttagaatttaaaacatatatttgcaaacttttgaatggaatatgacataaagagtgggaatttaaatttaagtttttgttgtatatatatgaaacaaggcgaagaaattattgatttataaagtataaattggaattgaggtgtcaataaatataaaaggaaatagtatttatatatgttttggtgttgaggtaaaagattaatgcaaagcattagagtctataaaaatatgaatataggaggtgtaattttacaatacttaaaaaagtaaatgtaattaattgtttgtataaagttgattacaagcaaaaagtatcagtcatagttaattctgttaaggatgaaggtggtgtgttaatttatatatgtatgggaagaaattttgattacaatgaaaaaacttacaaaagatatttatgaaaaaacttatagttaaatgtttatatataaaatattatttaggggttgtttttattattgaaaataagaaagagtggttttatatcaatcgaatgtataataagtattgctatattatatgtggctgtttatttagtttctacatcattgtataattgttatagttttatcagtagaaatatatctgacagagaaatgttaagtacagcaaaaaaatatatagaagatgagaagtatagaatacaaaatagtaagtatgagttaattgaagataagatagaaaaaaattacataaatggatatgaaattaacagtagaatagagcaaattttagattattatcaatgctatgaaataaatatagagataaaaaatgaatttaaaaaactgaggtttaatagctatgttactagaaaataaaggctctatattaataataacattgataatattttctattataagtactgtgtgcattatgtgtataggtttaatttatacacataataatatgtttgagttaggatacaaggacattcaactaaaagaaatttctttaagtggaatagaaatatcagtaagtaatgtactttcttgtgttgaggaagctattgatgtatctaataatgaagacgaatttagagaatatttcttaggaaataatatgattgaatgtataaaaaaaataaaagatacatcttatagtagtttagaagaactttctttaaaagtagaaaataatactatttatgacagaggagatttttttgaatttgatatagaaagtaatgttagagaaaaagaatttttaaaagcaataaaagtaagagtgaaaatcaaaaatccatggataggaattgacattgaagattatatggataaatctaataacaataaaattgatgacaaaacattcaataattataaagcatctgaaaataatgaaattctaaatcaatttaaaaatgaaagtgaaaatataaggaatcaagaggttgttgaatttacagaagaagatgaagaatatgaagaagaacttaaacaaaacataattgaaaatataaagaagaattttgatgaaaaaaaactagtacaggtatataagtataggggtgtataactttgaaaaaagaaggaatgtgactgtaatagaattaatagtatctatcagtataatactcttgatagttacattatcttttccaaaagataatcttgaaaatcataaaataaatttatttgcacgtcaactttgttcagatataaggtatgttaggcgaattaatatgtttagcaactacaatacatatatatattatataaatcaaggtaaacacgaaggttatgtattgagaaaagatggtaaaaacattaaatcaataatgctacctaaaaatgcaaaaatagctagaagtattgaaataataaagtttaaatctgatgggtcgcctcaaaaggcgtctacaatagagatatataataatagattaagaaaaactataacaataacacctgtaagtggaagagtacttctgaaagagggaaaatatgaaacataaatatggttacttgcttttggaaagtgtagtatcattgtcttcaatggtgataattatactagttttatattctatatttttgtctacaataaacttaaagttaaaagtagaagataagatagaactacaacaacaaagtcttgaaatcataaaatctatggaaggaattattagcaattctatgggaataatgaatgtatctaattatgaagaaacatttaaaaagacaacgtctataaaatgtagatatgtagatgaaaataataatgaagaaagcataagtaataaagaaattatattgaatgaaagacgaaataagttatttgtaaattctttaaatggcgaaagtagtcaagcaggtggttatgaaattggagattatgtagatgagatgtatgtattaattactaataatggtcaatatgttaatattaaattgaaattatcaaaacgtagtcaaaaatatgagactgatttcaaaataaaagtatggaattttagtgaaagtatataaaaatacataaatttaagataaagaaatgacatcaataagtcatataaaatataattattgagaactatataactaaataatatcaatatgtaaagtgtatagattaagaatatagaggataataataaaaatatagaataagtaatttgccaaatacttgtttatattgtataacttatgatattatgatattagtaaaaatttgtaatcctgacttgacagaattcaagtaagagatataattttaaaggcatagtaatgtaaaatttactaaaaaataagaaatttattttaatatggaggaacaaaaaatggtatcagcaggtgattttagaaaaggtgttacatttgaaaaagatggacaaccatgtttagtagttgattttcaacacgttaagccaggtaaaggagctgctttcgttagaactaaatacaaaaacttaaaaacaggagctataagagaagaaagtttcaatccaagtgaaaaattccctaaggctgttatagatacaagacaaatgcaatatctatacaatgatggtgagttatattattttatggatcaagaaaattttgaacaaataccattaaactatgagcaagttgaagatgcaattaagttcttaaaagaaaatgaagttgctacaataagattttaccaaggacaaccattccaagtggaagcgccaaactttgcagagctagaagttacagatacagagccaggtataaaaggtgatacagcaagtaatgtaactaaagcagctacagttgaaactggagcagttgttcaagttccattatttataaatactggagataaagtaaagatagatactagaacaggtgaatatttatcaagagtataaaaatttatgtatataaaagcttatatgtcttaataatataagatatatgagcttttagtttatatataaaaaagaaagcgaggggtgttacatgaaacatttatatgaagaagttgcatacttaaaaggcctagcagaaggactagaaataagtgctgaaagtaaagaagggaaaatgatacataaaatagttgatgcattagaagtatttgcagatgctattgtaacattggatgaagaacaagaagaacttcaagattttgttgaatctatagatgaagatttagcagatttagaagaagatattgctgacatggaagaagatctttatgaagaagatgacgatgaggatgatgaggacttcagctatatagaaatggaatgcccaaattgtggagagttagtagaaatagacgaagatttgttatatgatgatgaagtagatgttgtttgtcctgattgtaaggctgtgatattatcatcagaagatgattgtgatgatgattgtacatgtggtggttgtccaagttgtgatgatagagagtaaaaattcataagaattaaaactgcctatgatgcctatgagatattttgcttcataggtagttttatttttatgaggaagggtattatgtattttggttttgcaatacttggacaaaaatagtacactagaatttatagaataggattttggagggatgtaaatatgaaaataagtaaaaaattactagataatatacaaagatttgaaaatgttataaattataaatttaaaaataaagaatatatactagaagctcttactcatagttcatattctaatgaaaataaaaaatataattttaacgaaaggttggaatttttaggggattcggttttaggcatagtgataagtgattatttatttaatgaagaagctaatctgcccgaaggggaactaactaaacttagagcaaatatagtttgtgaagattcgttaagtgaagtagctaatgatataaatttaggtattcatatgttattaggtagaggagaagaagcaacaggaggaagacataggacttcaatattagcagacgcatttgaagctgtaatagctgctatatatcttgatggaggttttgaaagtgcaagacagtttatacttcatcatatggaaaatataatttatgattcaagaaaaggaaatatatttagagactacaaaacgcatcttcaagaagtgttacaagggaatggagaaaataatatctggtacaggcttatagaagaaaaaggaccagaccataataaaagatttgtaatggaagttggaattaatgacgatgtattgggtataggagaaggaaagagtaaaaaagaagctgaacagttagctgctaaaatagctttaaagaaaaaattatgggaaaaataaatataatatgtaaaaatataaaaagaaatatttatattagaaggatgttgtagatgaaaaagagaattatacctatatttgttcctcacaaaggatgtcctcatgattgcatattttgtaatcaaaaaaaaataacaggtgtgagtactgatgttactagtgaagatgcaagaaatataattgaggaatgtttagagactatagataaagatgcagatgtagaaatagcattttttggtggtagctttactgctatagatattgatatacaaaaaagtttattatcagttgctaaagaatatgtagaaaaaggtcttgtaaaagatattagaatgtctacaagaccagattgtattgatgaagatatattaagtatgctaaaagaatataagacaagtataattgaactaggagtacaatccttagatgaaaaagtattattagatagtataagaggtcatcaatctgaaattgtatacaagagttcaaagatgataaaaaatagtggaatcaaacttggattacagatgatgattggtcttccagctgacacagaagaaaagtgtatatttacagcaaaaaaatttgtagagctaaaaccagattgtgttagagtctatccaactttggtagtaaaagatacaggtcttgaaaagttaatggaacaaaataaatataatccatttactcttgaagagagtgtaaatatagtaaaaaaagttcttgtactgttttatgttaataatatcaatgtaataagagttgggcttcaagctactgatgatatacaaattggaaaagctgttttagcaggaccatatcatcctgcatttagagagttggtagaagcagatatgataaaagattatttagaatttgttattttgcaaaataaaaatataaagcaaatgttggtcaaatctaataaaaagaatatttctaaaatcataggaaataaaaaaacaaatgttaaatatatggaagaaaaatttggtgtgcttttaaaaacacaagaatccgatttagatataaatcaattagaaattgtgttagatgggaaaagtttaattagtgctaatatgagagacattcatagaaaattgtatgacatttatgacctttagttttaataatgaagggagagaaaagatttgtatttaaaaagactagagttaaagggatttaaatcctttccagtaaaaacagatattatttttaaagaaggaataacagccatagtaggaccaaatgggagtggaaaaagtaatatatctgatgctgtaagatgggtattaggagaacagagtattaagagtcttagaggtgataaactcgaagatgtaatatttgcaggtacagatacaaaaaaacctatgaattattgtgaagtggctcttactattgataattctgaaaatcaattggaattagattttacagaagtaactataagaagaagggcttatagaaatggtgaaagtgaattttttctaaataataaaagttgtagattaaaagatataaaagaagtctttttagatactggtattggaaaagatggttattcaatcatagaacaaggaaaagtagatgaaatattaagtaataatcctttaagcagaagaaaagtttttgatgaagcttgtggcatatcaaaatatagatataaaaaacaggaagcagaaaggaatttaagtaatacaaaggaaaatttagaaagaatagatgatgtatatatagaaattgaaaatcaattaaagcctctttttaatcaacagacaaaggcaaaaaagtacttggaaataagtgaaaaattaaagatacttgaagtaaatagctttataagagaaattgaaggaatagaaaaagaattaagtgaggttaatgaacatcgtaaggttattgaaaaggagctcaatgaaaaagaagaacaaaaaaatgttgtagagaaaaagcaagaagatattaataaagaggtagaggtattacaagatgtaattgaaaaatctgtagattatataaattcaattaaaggagttatatcaaaaaaagagtcccaaataaatttaattaaggaaagaataagaaattttacgaatgaaattagtagaaaaaatttagaaataaatgatataaaagagaagctaaatgaaaataagcaatacataaaagaattagaaagtaataaattatcaggtagtgaagaactatctaccttgcaggaaaatataaaagtattggaggcaagtaaagataaacaaaaaattaagttagaatccctaaataatgagatagaattattgaaagaaagtataattgatatattaaataagaaacaagagtttagtaataagctgtccactttaaacgcaaataaagaaaatatgaatatcagagatgaaaatataaattcagagataacagagttaaacaaaaatattgaaataaaatcatctgaattagatactataaataaagaatttaatatgcaaaatgaaaatttaaagaatgtaaataatagacataaagaattatcaattaatttgcaggattcaattagtgaacacaataaactagaagatgaaatacagaaaagtaaatataatttaaatggatataattcaaagttaaatgtctatatagatatggaaaatcattatgaaggatttaatagaggagtaaaagaagtactaaaaaataaaaatttaaaaggagttcatggagcattaggacaaattataaatgtacctgaaaaatatgagaaatctatagaagcagctcttggtgcttatatgcaaaatataataactgataatgagtttagtgctaagtctgcaataaactatctaaaacagaataatttaggtagagtaacatttcttccattaaatataattaaatcaaataaagtaagtctaggaaatttaaaagcaaatactaagttcataggaatagcaagtgatttaattacatttgatgaaaagtatagaaatataattgaaaatatacttggaagaacaatacttataaataatatagatgagggcataaaatttgcaaaagaaactggtcataggtttaaaatagtaactttagatggtgaaatcttaaatccaggaggttctttgactgggggaagtctaaaaactaatgggaatatactatcgagaaaaagatacattaatgaatatacagaaaagataagtaatatcaagaatgaaatttcacatctagaattaaaaagagaatctttagacaaagatgtgaaaaatatcaaaaatgaaattgattcacatgaaagtaaaataaaagatttagaaaaaagtataataataaaaagtacaagtataaagaatgttgaatctgaaattgaatcgttaaaaggtagtattactaaattagaaaatgagaagaatgatttaaattctaatctaaattatacacttgaaaaaagcgatgatgttagaaaagatatggaagagttagatgatttatacaataaaaataaagaaaaaattgatgcattgaatgaggaaataaaaagatacaatgatttatatgataaagaaaaatctgaatttgatgaattgaacttaagtttagtgaagaaaacagaagcttataatagtatagttagagatataaaaagaatatctggtgaaaattgtgagctagaagaaaagaataaacaattagaagagtcattaaattatgaagaacatgaaataattaaattacaagattctatagccactgaagaaaaagaaaaagaaaatttaacaaaacaactaggggatagtaatagaaatcttgaaactagaaaaatagcaaaagatgatttaaaaaatagttttgatgaaattaataaagaattaaaaactatagatagacagcatatagagcttaaagaaagtttatttaaagttggtggaagattagaaagattaaaaactagtcaagacacatatataaataagttgtttgagcaatatgatatgactttagtacaagcattggaaattaaagatgaagatttggatatagatagaaaattcttagaaagtctaaagagagaaataagaagtcttggaaatataaatataggctctataaaggaatatgaggaaataaaagaaagatacgatttttatagcgaacaaaagcaagatttagaagagtctatggaagagatagaaaaacttatacacactttagaagaaaatatgaaatctgaatttgaaattaagtttgaagaaataagtaaaaattttaaatatgtatataagagattatttggtggaggttgtggagaattaactattttagataaagaaaatttattagaaagtgatatactaataacagctcaacctccagggaaaaaaatgaaaaatttaaatctattatctggtggagagaaagctttaacagcaataagtatattatttgctatattgattacaaagccaacaccattttgtatattagatgagattgaagcgccacttgatgatgcaaatatatttagatttggagaatttttgaaggatttatctaaagagactcaatttatatcagtaactcataggagaggaactatggaagctgctgattatatctatggagttacaatgcaagaaaaagccatttcaaaagttattagcttaaaattaaaagaagctcaggaaataacagatattatataacttagattgacataggaggaataacagtgttaaaaaaattatttggttttggaaaagacaaggaaaaagaaatagaaaaaaaagatgctgaagaagaaatagaagttgaagacagtgttgatagtttagaaaacttggaagaaaccattttttcaggacttgaagaagaagtgatagataaagtggaagatattgaagaaaaaactgaggaaagtgtcaataatgaaggcactgaagaaatcgaaaattttgaaaaaatagaagttgagatggatagtaatgcaaaagaagtagaaaatatttcaaataatgattctcaagaagagataatcgaagaattagaaaattatgatgaaattgagtctaaagagatagaagataaagaagataagaaagttaacttgtttgaaagactaaaacaaggattgacaaaagcaaagcaaggaataactgatagaatagatgaagttttaaaatcatatacaaaaatagatgaagaattacttgaagatttagaggaaattttaataacagcagatgttggtgtaaatacaactatggatataattgaaagactaagagataaaataaagcaaaaaggtattactgaaccaataaaggtaagagaagaacttaaatctatagttgaagatattcttacaaatgaaaactctacactagatatagaaccagcaccatgtataatattaatggtgggtgtaaatggggtcggtaagactactacaataggtaaactagcaaatagatacaaaaaagatggtaaaaaagttttattagcagcagcagatacatttagagcagcagcaacagagcaattagaaatttgggcaaatagaaccaatgtagacataataaaacatcaagagggagcagaccctggagctgtagtatttgatgctataaaagctgcaaaagctagaaaaacagatgtattaatatgtgatacagcaggaagattacacaataaggctaatcttatgaatgaacttggaaaagtatttaaaatagtagatagagaatttccagaagcaaaacgtgaagtacttcttgtggtggatgctacaacaggtcaaaatgcagttgttcaagcaaagacatttaaagaagttgcagatataacaggtatagtacttacaaaacttgatggaactgcaaaaggtggagtagtccttgcagtaaaatcagaagtagatgtacctgtaaaacttattggagttggagaaagtgtagaagacctacaagatttcaatgcaaaatcattttcagatgcattatttggtaactaatgttcttttaaaaataatggttgacaagagtgttgttatgatataaaatacaatagtgtaaagtaaataacctttacagtatactgctaggaagtgtaagatatgaatatagaaaaaatggtcgaaattggattgttatttgaacagtataaagaattattaactgacaagcagaaagaaatagttgctctatactatgaagaagattattctttaggtgaaattagtgaaaatctgaatgtatcaagacaaggtgtttatgataccttaaagcgttcagaaaaaatactaagagattatgaagaaaagttacacttagtatcaaagattcaagagcaggaaaaaaatattaagattataaaagataaaattattgacattaaagaagatttattgcacaatagagattgtgctaatttaatccctaagctagaaaatatagaagatgtatgtagggagatgataaaatgatatttgaaggattgtctgataaactacaaggggcatttagtaagttaaaatctaaaggaaaacttacagaagtagatgtaaaaaatgctatgagagaagttaaacttgctcttcttgaggcagatgttaactttaaagtagttaaagatttcataaaaaaagttcaagagagatgtgttggacaagaagttatgcaaagcttaactccagctcagcatgtaatcaaaattgtaaatgaagagcttacaagtttaatgggagatgtacaaagtaaagtaatgatttcctcaaagcctcctacaattttaatgatggttggattgcaaggtgcaggtaagactactacagcaggaaaacttggaggatattttaaaaagcaaggtaaaaaacctctattagtagcttgtgatatttatagaccggcagctataaagcaacttcaagttgttggagaaaaattggatatacctgtattcaatatgggagataaagaaaatccagtaaatattgcgaaagcaggtttaagccatgcgattaaaaatgctaatgatttagttattatagatacagctggtagacttcatatagatgaagtacttatggctgagttaaagtctattaaatcagaagttaagccacatgagatacttttggttgtagattctatgacaggtcaagatgctgtaaatgttgcagaaagcttcaatgaggcacttggtgttgatggagtagtattaactaaattggatggagatactagaggtggtgctgcactttcaataagagcagttacacaaaagcctataaaatttatggggatgggagaaaagctagatgatatagaacctttccacccagatagaatggcatcaagaatattaggtatgggagatgtcttaagtttaatagaaaaagcacaagaaaatatagacttagagaaagctaaagaattagagcaaaaaattaaaaaacaagagcttgattttgaagatttcttacaacaaatggaacaaatacaaaatatgggacctcttgacaagatacttggtatgatacctggtatgggaaatgtaaaagaccaacttggagatgtagatttgaatggcaaagaaatgaagagaacaaaagccataattcagtcaatgactacatatgagagaagaaacccaggagtattaaatgcttcaagaaagaaaagaatagctaagggcagtggaactagtgtacaagatgtaaatagacttataaaacaacttaatgaaatgaaaaaaatgatgaagatgtttgctggttcacaaaagagtatgaagaaaaggggcggcttaggcggtttacctttttttaaataaaatataaaaaagtaaaaattattcggaggtgactgtaatggcagttaaaataagattaaaaagaatgggagctaacaaaaaacctttctacagaatagtagtagctgattcaagagctccaagagatggaaaatttatagaagaaataggatactataatccaatttctgaacctaaacaagtaagaataaatgatgaaaaagctataaaatggttagctactggtgctcagccaacagaagtagttaaaaaattacttgtaaaaaacggagtaatagaaaaattcgaagcttctaaacaagcaaaataattttttcttggcaattagtttaagtaagggctcattgctaaggttactttaggagatgaaatatatgaaagagctagttgtagatatagctaaggctctagttgataatcctgactcagttgttgttgaggaatttgaagataatgatggtatcgtcttaaagcttacagttgctcaagaggatatgggtaaggttattgggaagcagggaagaatagctaaagctataagaactgtcgtaagatctgttgcaaatagagaaaatataaaagtttctcttgagatagtataaaataggaggattaggtataatgcctagtcctttttatataaatgcgtagtttaagattttatgatgatatgaccacataagattaaattttttaagaaggtgataacatgaaagaaaaattaactcattttaaggtaggtcaaatagtaaatacacaaggtttaaaaggtgaagtaagagtttatccacttactgatgatatagagaggtttgatgaattaaaagatttctatctgggaaaagatttaaataataaattggctgttgaaaaagtaagatacaaaggttctatggttataatgaagataaaaggcatagacagcatagagaaagcagaaaaactaaaaaataaatttatgtatgtatctagagaagatagcagagagcttgaagaaggcgaattttttatagcagatatgattggaatggaagttttaactgtagatggaaaatatgtaggaatactagaagatgttcttcaatactcagcaaatgatgtttatgtagtaaaaggtgaagaagataaagaatttatgataccagctataaaaaaatttgtacctacaatagatattgatgaaagaaaaatgattatagaccctattaagggaatgatagattaggtggtaatatgagatttcatataatgacactttttccagaaatatttaattcgtacatggatgaaagtataatgaagagagcagttgaaaaaggtataattgaggtttatatatataatataagggatttttctaataataaacataaaaaagtagatgattatccatttggaggaggagtggggatggtaatgactcctcaacctatatatgacacatataagcatataataacaactcacaatataagtaatccaagtgtaatttatcttactccaaaaggtaaggtatacaatcaatctatagcaaagcagatgtctttaaaagaagatataatactattatgtggccattatgaaggagtagatgagagaatcattgatttaatagttactgatgaaatttcaattggagattatgtattaactgggggagagctcccagcacttataatgatagattctatatcaagattaataccaggtgtattaaaccaagaagaatcatttgaagaagaatcatttaaagataacttattggaatatcctcattacactagacctagagattttgaaggattaaaagtaccagaagtgcttttatcagggaatcataaaaagatagatgagtggagaagagaagaatctataaggataaccaaagaaagacgatttgatttatataaaaagtctaatgaaaaataaaaatataatgaaaaattaatatatatgtatacaataaagtacctataaatggaattaaaaacataaaagtgcttgtaataactattgaagtatagtataatataaaatgttgaaaatacgggcgttcctctgtttacactggtcgggtagttaagaacgtctatgatatctaggaggaagaaagatgaatgaaatgctaagagcaattgagcaagaacaattaaaaaatgaagttcctaattttggacctggggacacagttaaagtacacgttagaattatagaaggaaaaagagaaagaatacaagtattcgaaggtgtagtattaaagagacaaggtggaggagcaagagaaactttcacagttagaaaaatgtctttcaatgttggtgtagaaagaactttcccagttcactctccaaaaatagaaaaaatagaagttactagaaaaggtaaagtaagaagagctaaactaaactacttaagaggtagagtaggtaaagctgctaagataaaagaagctagaaataaataattaaaaactttacttataaatggggggctgatttatcagtcctctttctattttaatgaaaattacagcaaataattatactagaaataaatagaaatatttgttgaaaatatacattatttatctatgaatttatagcttttaaaatgaaaaataaaattggtaaatattggattatattttgtaacgatattaaaaataagagaacagtattatgtaaagtatgacgttaaaaagatgacaatattatagtttgtgaagatagattttttaagtggaattagaatataataatataatattaataaggagtgatacatgtgtcaaatgaatacgaagagtatcttatggatgacaatctacatataaactggtatccaggtcatatgaaaaaaactaaggagttagtaaaaaataacttaaaattgattgatgtagtaattgaacttttggatgctagaatcccgtttagtagtaaaaatccagacatagacaggcttgtaggagataagccaagagttgtcgtacttaataagagtgatatggcagatagggataaattgaatcaatggattgaatactataagaaaattaatatcaaagctataccagtagatacaataaaaggtgttggtataaataatataatcgaagaatgtaaaaatgtaactagagaaaaaatgagttctttaaaagacaaagggagaaaagaaagagctatacgaataatgatagttggagttccaaacgttggtaaatcgtctcttataaacaaattaacaggtagaaaaagcactcaaactggagataagccaggagtaacgaaagggaaacaatgggttagattaaagggaaatcttgaacttttagatacacctggaatactttggcctaagtttgaagaccaagaagttgcattaaatttagcatttagtagagctataaaggatgagattttagatactgagactttggctttaagacttatagaaaaacttatgaaaatagaacctgagaagttgaaagccagatataagttagattgtctaggagaaactccaattgaaactatggatatgattggccataaaagagggtttataacaggtaaaaaagaactagattatacacgcatagccgcaactgtattaaatgaatttagagatggaaaaataggaaatataacattggaagttccagaaaacgttaaaagatagattttaaaacaaaatcaaagatttaatgttaaaaaaataaaaaagccttttagcaaaggcttttttatttttttgaaatatagacaaatatctccatataaaagtataaattaggttagaaaacctttaaaaatattaatttaagacaaatacacctaatattttgaaaattaaaatgagtgtgattattttaaattttagcatattgacttgcttgtttcgtataatatataataagcacaaataaatacaatatattaaaaatttaatttatttaattttattaatttaataataagttcttattgtttaatttaatttatttatgcaagcgtaaacaatcgagacattttattaatttaataaggttaaaaagggggattttataatgggtaagaccaaggatgttatagtatttggatttgcgttatttgcaatgttctttggagcaggtaacttaatatttccaccttacttgggaataattacaggtccagaatggttaattgccttcttaggatttacgtttgctgatgctggattggcacttctagcagtaatggctacagctaaattcgatggaaacgtagttgaaatgtttaaaagatgtggtatgaagttagggattcttataggttgtgcagacattttatgtataggtccattcttagctataccaagaacaggtgcaacaacttatgaaatgggtataatgcctttatttggaacttcaattccagtgttattattctgtatacttttttttgcgctttcatatgtactaacaataagaccttctaaggtcgtagatatagttggacagtttttaactccagctcttttaatagctctagcatttataattataaaaggtattatatcacctcttggagatatagtagataaacctatgatacctaatgtatttgcagaaggtataggtcaaggatatcagacaatggatgcttttgcagcaatagcacttgcatcagtgttaatagtatctttaaatgataaaggatattctactattagtgacaagttaaaaatgattggtaaggcgggggttcttgcttgtggaggattagctctagtttatggaggattatgtttccttggagcaactgtatcaacaatgtatggaacagatgcagtacaatcacaagtaatagtaaatataactgaaggattacttggaaatgttgggaaagcgattttagcagtagtagtatcattagcatgtttaactacatctataggtcttacatctgccacaggtcaatatttctctagacttacaaaaggtaaattgagttatgaaaaaatagtattagctgtatctgtattcagtgcagtagtagcatcttttggtgttggaactataataaagatagcatctcctatactaagtatagtttatccaccatcaattgttttaataattttagctttcttcaatgaaaaaattaagaatgataatgtgtacaaaggagcagtatatatgtcattgcttgtaagtatactaacagttatatctagttatggagtagatgttccagtagtaaaatctttacctcttcattcattaggatttaactgggtggtaccagttataatagctggaataattggtaattttataccatcaaagagtcaatctaatacacttggaacaaactaagttttgtttaattaaaatataatcaattgtaaataaatgagttaactaaaagtaaaaggagttatttgtacaaataactccttttattttgggattctataattaattatttgtatttaatatggaaaaagtataagaaaatatcaaaaaaatatatagtttattttttaacaataatagagattaaaaaagaattttagagtaattttataaatttaagtatacatattaaatgatttttacaaaaatataatataaataaaattgtgacaataataaaataataaaacaaaatttaagacatatgattatataaatgtattaaataaatgagtaaattgttttcattgagagatatattaagaatttttagttaattatgacatataagtatgtaaacgtgaatactagcaactgcaaagtttaagtaagttggaagttagaaagtaattgctatgaagaaaaataagttgataaatcataataaggaattttcagaaaaaatggttttaagactaaaagacaagaggtaaatctacgtgagtagaataaaaattgaataaagttaactgtcaatttagcaaaataaatacaaaatactacaagaattaacgttaataggtgttatgataaaaggaaaacgattttttaagaatcataattttgaaaattaaaaaaattaaaaatgctattgactgcttttttttcagattatataataaacacaaaatatttaaaatttaaattgaattaaaaagattatatgaatgtaaaaaggagagtgatatatacagtatataaagcaatacaacttaataataaaacgaataatctaaaaagtcttaatattttaattgttctgaatagttaattttatcaaggaaaattagagaaaaaacaaaaaaccaactatgtttaaagtatacaggttgattttgtttaattaagaaagttgtattaaatattgtgaagattttataaattatgaaacataattgacaaatttaagtcaaaaatgtataattaaataaaatctcgtcaaaaggttttcatttaatgaagagattggacttattttttagtaaaaggtagtaaaattcaaatgggggtgctttaaatgggtgagaaacaaatcaattttaaagatgtaattgtaattggatttgcactatttgcaatgttttttggtgcagggaacttaatcttccctccatatctaggagttttatctggaagtagttggctaatagctttcataggattcctttttgcagatggtggtttggcattattagcagttatagcagcaactaagttcaatggagacacatcgaagatgttctcaagagcaggcaaaggattaagtattgcattaggatgtgcaatggtaatctgtatagggccacttttagcaatacctagaacagcagcaacaacttatgaaatgggtatattgcctacaataggttctggaataagtccagtaatattctctatagtattctttgctctagtattggttttaacaataagaccatcaaaagttgtagatatagttgggtcaatattaactccagctttacttatagctttagcagtattaatagttaaaggtatcgtatctccattaggagaaataagagacagttctttaattcaaaatgtatttgcagaaggtataactcaaggttatcaaacaatggatgcattggcagctagtgtatttgcatcaattataatcatgtcagtaatagctaaaggttatacaggtgagaaagaaaagatgaaagccacaataagtgcaggtgtaattgcagtaataggaatggcattagtttatggtggattatgttatcttggagcaactgtgtctcaacaatatggacaagatgttcaacaaacagctttaatagttgcaataacagcagctttacttggaactacaggtaaaattttattggctattatagttgcattagcatgtttaacaacagctataggtctttcttcagcagctggtcaatatttctcaacacttacagatggaaaattaaagtatgagcatatagttatagtagtttgtgtatttagtgcaatcatatcaaactttggagtaagtacaataataaaattctcttctcctatactaagtatggtatatccagcaactataactctagttatactagcattatttagtaataaaattaaaaatgacaacgtgttcaaatgtgctgcatacatggcattattagtaagtgtattaacagttgcaacaagttttggtgtaaaaattcctctagttaatagcttaccatttgcttcattaggatttaactggatagttccagttgtaatagcaggaataataggaaactttattccatctaaaagcagtaaaactgcataataataaaactaattgataattgtggaattgcctttaaattatatggcaattcctttttatatttaaaagaattattaaattattgtggagaaaagaacattattaatctcatttgataaatttatttttggaggagtatgatttataaagacaataaaataaaaaagatttatttataattataaataaaattaaattatatattatgaatgtttaatattaatataaaaacatcaatatatatttttgtaaagaaaaaataaagaatttattttctgaatacttattaattaatcaaagttaaaatgaaaaaaatataaaaaaataaagtatataagagtataatttgacttttatatacttttttatattatttttgagttttttaggaagatattttacaagttaagaaaactataaggagtgttatattgaatataaaatagtataatatatattatgttagataattaatatgaaaatatacaaatatataaaaaagtttgtttagagttatagttaatgtgtgtattaatttaatactaatttattggaggtttaaaaatgaaatacataataaaaagagatggtacaaaagaactttttagtaaaagtaagattgaagatgctgtctataaagctagtataaatagtgaaggtggagtagatagagagttggcatatgatatatcaagaaaaatagctaatgactataattctatggaaaaatgcttatccgtagaagaaatacaagatatagttgaagtactacttatggaatcaaatagaaaagatatagcaaaacactacatattatatagagaaagacgctctgaaataaggactaaagcttgggagtttgatgaattacaaaaatcaatatggaagaacaagtatagacataatggtgagagttttgatgaatggataaagagaatttcaaataatagttcaagaatatcaaaactaataagacaaaaaagatttctatttgctggaagaattttagcaaatagaggattacagaaagaaggaaaaaaagtaacatattctaattgttatgtaatagaaccaccaaaagatagcatagaagatatatttgatactgcaaaaaaacttgctagaacttttagttatggtggaggagttggaattgatatttcaaagctaagaccaaaaggagcgaaagttaacaatgctgcaaaacatacgactggagcagtctcttttatggaactttacagtatgacaactggcttaattggtcaaagagggagaagaggagctcttatgatttctatggatgtaaatcatccggagatagaagagtttatagatataaaaacagatttggagaaggttactaaagcaaatatttccataagggtaacagatgaatttatgcaagctgtaagggaaaaaaagttatataattgtacttttgaagttgaaactactggagaaaaaatagttaagatagtaaatgcttatgatttatttaataaatttgtgaaaaataactgggattatgcagaaccaggtatattgttttgggataaaataaaaacatataattttatgagtgaagataagaacttttgcttttcaggagtaaatccttgtgcagaagaaccacttccaagtggaggaagttgtctacttggctcaataaacttgtcagagtttataatacaaccatttggtgaacatgctacttttgatattaataaattaaaatcttgcgttagagaagctgtagtagctttaaatgatgtcttagatgaggggttgaacttgcatccattacaagaacaaagagatagtgtacataagtatagacagataggtttaggtgtaatgggtatagctgatatgcttataaaaatgggaataagatatggttctgatgaatctttagaactatgtgatttaattggtaagactatgttaaatgaagctgtgaagcaatcagcattaattgctaaagaatatggaacatttagtgagtataaatatgaaaatatttctaaatctaagttttttatagaaaatctaaatgaagacactaaagaaatggttaaaaagtatgggcttagaaattcacaacttttaaccatacctcctacaggttctatatctacaatgataggtatcagtggtggaatagaacctatatttaatctttcatatataagaaaaactgaaagcttgcatgatgaggatgtgtattataaagtatatactccaattgttaaagagtatatggacaagaaaggtattacagatgaagaatgtttaccagatttttttgttactgctatgaatataggatatgaagaaagaataaacatgcaaaaagtatggcaaaagtatattgatgcttctatatcatctacaataaatataccttttgaaactacagttgaagatgttttcaatatatatattaaggcatgggaggctggtcttaaaggagtaacaatatttagagatggatgtaaaaggagtggaattttaataaatgaaaaaaaggaagaaaataataaagaagataaaaaagaaaatagtaaaaaagaatattataaaaataataaaaaagaaaaagataataaagatgaaaaagccaaagaaataataaataaaaattttgaagaagatgaaaaatttgtgtgccctgaatgtggaagtgaaggaattgcacatacaggtggatgtagtatatgtttaaaatgtggctatagtggatgcaattaaactctaattaaaaaattttaatatatttaaaaattaaatttttaaaaacgaaagatgagggaatggtatgcaggataaaagtgtgagggagattaaagaaataatagagactttagaagtagaaaaatatatggaatatatagaactgttaagagttgatgaaagaaaatctgtacaaggtctagctataaaactagcaaaaaagctggataatattagaaaagaagaagaaagattggaaactataaatatatttgagaacgaaggctatgataaaggttatttgtatattggaggaattgatgaggcgggaagagggccacttgctggacctgttgtagcttctgttgtagtatttaaaaaagatacaaaaatagaaggtgtaaatgactctaagaaactgagtgaggcaaaaagagatgaactttttgaagtaataaaagaagaagcactagattatggaataggtatagtaaataatgaagaaatagatgaatttaatatattaaatgctacatatatggcaatgaaaaaggctataaattgtttaaaaaaagcaccggattatttattagttgatgcagcaacaataccaggtattgacatatctcaaaatccaattgtgaaaggagattcaaaatctatatcaatagcagcagcaagtatacttgctaaagttactagggatagtataatgtaccaatatgatagagtatacccagaatatgggtttaaatctcacaaaggatatggaactaaagaacactatgaagctattgaaaaatatggcataactcctatccacagaaaaagttttttgaaaaatatactgtaaatataatatgatataatgtatataatataaattactatagttaatgggggattaaagatggaatataatgaattattaaaaagtgctagagaaaatttaaatggaagttgtaaagtttgtaaggtttgtaatggggttgcttgtgcaggtgaagtgcctggcatgggaggtaaaggaagtggttcttcttttatagaaaatagcaagagtttagaaaaagtaaaagtaaatatgagagtaatacatgatgtatcaaatcctgatacatctatagagatgtttggaaagaaaatgagtgcacctatatttgcagctccagtaacaggaactactttaaatatgggtggaaaaattaatgaaagagattacatagaaccagtagttgcaggatgtgctaatagtggtatttatgcaatggttggtgatacggcagtagatgcttttttaatggaaaatttagatgtagtcaaaaagtataatggagctggaattgtatttattaaaccttgggataatgaaaatattataaaaaagataagattagctgaagaagctggtgcatttgcagttggagttgatatagatgcctgtggtctagtaactttatcattacatggaaaaccagtacttcctaaaaatgttaaacaaataaaggagttagtaaagtctactaaactaccatttatattgaaaggtataatgactgttgaagatgctttaatggcagtagaagcaggtgtgtatgcaatagttgtatcaaatcatggaggaagagtgcttgactgtacaccaggagcatgtgaagttttaccaaaaattgctgatgctgttaaaggtaaagttacaatacttgcagatggtggagtgagaactggtttagacgtactaaaaatgataggtttaggtgcagatgcagtattaataggaagaccttttgtgactgcttcatttggtggtgcaactgatggtgtagaaacttatgtaaataaacttcaatcagagctaagtagttctatgatattaactggatgtcaaactataaaagatattgatggaaaagttatatacaaataaaattttatacaaaaaagaggaaaaatcattttaatgtagaataattgtacaaagggggaatttatatgagtagaaaagcttatgaagaagccttagtagaattagaaaaatttattgatgaaagaaaagaaataattaaaagtgcggaggactgtattgataagtacatagttgacagaacgctaccttttgattacaaagataaatgtgtggaatggcaacaagagttacttgatattgcagaggcacaagttttagaagcaaacgaattaggtgttttactggaagagaaaaaagaacttgaggaagagtaagttttattactaaatctagggaaaatcaagaatatgatttacccctagatttttttatttaaataaagatgtctatataattaatctatctttatcaatgttagattaaaaggtttgaagaaaaatagagtaattgtatgaatagttaaacaattaaactagtctataagaccaatttaattgttattttttgaatttagtatatggtttttcatttcttctaatacaattgtgtaggatttgcattgtgctgcagccaattctgacaaagcaaacctttgagccttatttagaaagtccttatctgtgctacatagttgttttgaattatcttgtatcataagcatcttaattaattttacaatctcaaaaacatctcctgaatgaaatttatcatggtatagtttaagtcgtttttttctatcaaaaacccataaacaatcaaccttatcaagggattggataaagttttcaacttcattttcatccataattggacgtacaccaatcttatcagcatttaaaactggaatcgaaattttaagattactattgtaaataacagtcaattcatagtatttctgtatatgatgatttatatcctttgttacaagaccacttatataacaggctccttcttttggatacattacactttcaccgattttatacatatggttatacctccaaactgaattttagatattgcaatttgggtacaatgctttaattatctaataattaatattatatcacgaaatgcttgacaagtcaaaaagattaatatataataaaaagtttagaataatagatatatataattggctataaaaatataagataagaggatttaatatattaaaatatctagttagtattgtataaaataacatactaactagatttaataattattaatttctagcaaaatctcttaagttaagacttccggctgttacaaataccattccaataagaattaaaacaattatatttattaatatattaccattattattaatagcatctatagtccaataaaatggtgtaagctttgaaagattagccataaaggataatttatcaagtgatggtatcatattagatatggatatagctaaacctattaaagaataaaacgtagacataagacttatagaaccttcgtttttaaacaccctagctatccaaaatacaaatccagtagcaacaaaactatttgctagtacaatcatcaatgtatttagagtcaatttaaaattacttatagatgtgaaacatactaaagttaaggtgtatacaattgcttgagtaaaaaataaccctaaaaatatgctgaaaattatttttatatcattatgctttgtagaaacaagtctttttaaggtattagatttctttaatgaaaataaatcagaagctagatgtgctgcattaatgtacatgaaataacatatcaagaaaactattaaaaatgaatttttattcttacctgaactgttatcaattatatttgtcttggtcaatttatcatctatatttctatctatttttaattttaatgaattagtaataaaagattctatttgtgattctgcccaaagactacctccaccattttcagttttaaaacatttaacctcaggtcgttttaagttatctatattgcttgaaaagtttttatctaaaatgaagacagcagaaactttattattttttaatagatccatagccttgtcttgttcgtttaatccaaatgagttttcttttaatttagaactatctattaacttatgttcgtattttccagaagaattggatacaatcgctactggagaaaagtacattgattgattttctgagttgccagtaaaaaagttaagataaaacattaatataacaggaaacaaaaccatattaactaaaagagcatgattttttatatatctttttatgtttgcaatagtcaacctaatcattattaaacctccctccatttatatttttcttttacaatagaaagtgcaatcaatactgtagatgcaattaggcatgtaaaaattaaactttctattgaatctatagttttaaacgtctcataattactgaacaatgttcctattaaataagtaggagataaacttgtaaacttagtaaacacatcatttactatgctgaaaatacctccaaaaactgtttgcaagaagagtaatgcataaactataactgtaccatatttcttgctaaaaaaggtagttataaaagtagatattgaagtcataaaataagaagctaaagcacaaagtaaagctaatataacaaagttacctttgaatgttacaccgagtgttctaaaaaataaaacgtataatgataaaaatataaatgagtaaatccagaaacctataaaatcataaattaaaaattgtactctagttacaggtatagagtagagtctttttgaaagtccttttgattcacttacataatttgataaaatgctattcattataaaaattattgcgaagaatccaagggaaactaaagcaaagtactcataagagttttgtttaacattattttttattatagaggtatcaatagaattcttattaaataattttgagaaatcttctgaacttaatttttgagaattattcagatataatttttcatgataagtatctaatatatcttgaagtaatattgcaatattatcattagatttaagtttttctatacttagattatttgatttttcatttaataaattattctcatatcctttaggtatagtaagttttaagtctgccttagaatcatctttttgaactgttaatatagaagataaatcgttttttagatatcctgtcaaattacttgatagctttgtattatctttatcatatataacaattgatgtcaaatctgtttttataggattttgaaatatactttctgtcaccatcccaagaaatccagctaaaactagaggtaaggctaagaaatatattaaattaagcataaaggagctttttaaaacttttagcatagtttttacactaatgtacaatttcatgaaatcacctccattagtcccttaaatttttacctgttagatttaaaaatacgtcttctaaactaggttcttcataagatattcgtgttatttttgaattatttttgtcaacaacagataatacatctgtaagttgtaattttttgtctacacctaattctaataatgaattattttctaaaatagatacaacacctttagtattttttaaatcaaatataagttgagcatttatattttttatttccataattaattttgtatttgtagatactaatgattttaaataatcattatctccaaaagcaatctctttaccttcatccataataaaaatcttagaacaaagatgctcaacttcttccatataatgagaagtatatattactgtggttttttgctttttagatatattttttataaaattgaaaatatggtttcttgattgcgggtcaacacctacagttggttcatccaatattaatattttaggatgatttaaaagtgctattccaatgttcaatctcctttgcataccaccagataattttttgatttttttctttttaacatcagtgagtcctgtgacttctaaggcttcagttattctctcttgaagcaattttccctttagtccatagtaagtgccaaagtactctaagttatcaaaaggagtaagagtctctataagtgctaattcttgtggaactaatcctattatagactttgcttttatacaatcttttgacaaatctaaaccattgatttggatgtcgccactatttggtaacataagatttgtaattatatttataagtgtagatttaccagcaccattcggtccaataagtccaaatatctctccttctttaacagaaaagctgatattatcaagtgctaatttatcattaaatctttttgttatattatttactcttactatatccataataattcctcccaaaataattttgtataagttaaaaatctataatactataataaagaattatgaatcataattctattactataagtcactaaaaaaagtgacttaagtcactttatattttcatttattataaatgagtttgtgagtaagaaatttctagggtatagatttcttacctatatatttatattacaattttatttttgaaggcaaatataactagttgtgtcctatcacgaagctctagtttccctaagatattggtgatattattctttattgtaccttcagataagaataattcttggctgatttctttgttgttaagtccatttgcgattaatctaattatggatatttctttttctgttaaattatacatatcagaaatatgtttttgttctatagttttttgagggtacataattttttcagccacacttttatcaagtacaatatttccaaaaaacgaggaacgaatcccttcatgtaatacttcatccgaactatcctttaaaagatatcctgaagccccaaatttcatagcatcttctatgtactcatcatcattaaaggttgtcaaaattaataatgctatagagctatcatattcttttataagtcttgtgcctagaactccatcacaaactttcatccgaatatccataagaactatgtctacatcatttgttttacaaaattctaatgcttcatatccattggaagcatctcctacaatttctaaatcgtcataagatgataaaataatgttaagaccttttctaatcaatttttcatcatctactataagaactttgattttattcaaaaaaatcacctcctgaaaatttaggaaaagacgctctaattgtgaatccagtattagaattatcgaattcaactttaccatttaattcatatattctttcgctaatactgctaagtccatttcctctttttatattgttacaccctataccattatcgctgatagtaattataagatttgaaggattaaatgttataaaaattctgatttcagttgcttttccatgtcttgatgcgttggaaagagattcctgaacaagtctatataaagcgatagattgatttgtagataggttccaggtattttttgatatagttaatctaacgttgatatttgtaagtttaataaagctattaaccagttctctgattttaagtaaattttggtaattttcatattcaatgggttttagttcagatatagctcttctcacatcttgaaaactttcagttacaaactctctaagttcatgaactaaatcagaaatgagaggtttgtcttttaagagtttttctatagcatttaattggattatcgtcgtagaaagagaatgtcccacactatcgtgtatttccctcgatatacggtttctttctttcaaaattgctaactcttctatagaatttgcataaatctctaaatcggcattagctttttttaattcatctttagaaaccctgagtttgtcataaagactttgattgtataatttagataaattctcgttttctagatacacagaaaagagggttataattagtaatgtagaacttgattctagtgctaaatataaatttttatctaaaccaataataaaagaaaatattataactaaagagaataatatatatttatatttttcctttattaaaaatgaggcatccaaaattaaagaaacatagtaaagtggattaaaagtctttatatacttacaaaatataaaaattagaataagctctaaaaaataagaaataagtataaatttattctcacttgataaagaaaaaaatctaacttgattatttattattagaaataatataatcattgttatagctggatacaatgtattttcagtatggtttaaataacttataagtaatataaatagagataaatatcgtataaaaataaatgttttttttctgttcattaaagacattcctccataaaaataaactttcattataaaaactagcataatatcataaaagaataaagtcaatagaagtatttattaatatcaatggaaataaaatcaatttcaaaaaattgaatagttaaattgtatactgacgataatttaaaagtaaaaatttaatatattggagtagataatgaataataaagaaaaaggtgattttggagaagaaatagcagttaattatctgctatcaaaaggtgcaaagatactagaaaaaaattatagattaaggataggggaggtagatataatagcaaatataggagatgaagttgtatttgtggaggtgaaatcaaggtctaacataaagtatggctacccttgtgaatctgtagattttaaaaaaagaaaaaagataattggtgtcgcaaaatactatattataaaaaataacttaaataatactcccataagatttgacatcatagaggtctatttgttagaaaaaagaataaatcacataatgaatgctttttaaaaaagataatgtttttggaaaggattaaatatgttaagtattattaattcaagcaacttagtaggaatcgacagctttttagttaaggttgaagtagatgtaagcaatggaatacctagttttaatattgttggtcttccaggcaaagaaattaaagaagcaagagaaagagtaaagtcagcaattcttaatagtggatataaatttccaagcacgagaatagttgtaaatttatcaccagcagatataaaaaaagaaggagcttttttagatttatctataagtataggccttttaagagagttaataaaaaaagatgaaaattacataagagaaagtatgtttataggagaattatcattagatggaaaaataagaaaagtaagagggatattgcccataattatgggtgcaaaaactcagaacataaaacgtatttttataccaattgagaacataaaagaaagtctattagtagatgaaattgatataattcctattaaaagtttaaaagaatgtgtcgattttttaaacgaagagataaaagtcgataaagtaagtataatgtcttttttggatgataagtcaagaaaagagaacggagaattagaaaaagataatagttatatagattgcaaatatactaagattaataatgaagaaagtaaatatgatgaagactttaaagatgtaaaaggaaattattttgtaaagaggagtgcagaaattgcagcagctggaaatcataatatgtttatgattggacctccaggctcaggaaaaactatgattgcaaaaagagtaaggacaattttaccagatataagtatagaagaaatgatagaagtaagtaaggtttatagtatattgggtatgataaatgaaagtaaaggaataattgataaaagaccttttagagcacctcatcatacaactacaaagcaatctttaattggaggaggaatggatgcaagacctggagaaattgctttagcacatagaggtatcttatttttagatgagatagccgaatttgatagaaaaatacttgagactttaagacaacctatagaagatggatatgtaaatatatccagagtaaagtacagtgcaaaatatccttgtagagtactgttagttgcagctatgaatccatgtccatgtggttattatatgtcagagacagagtgtagatgtagaagtaacgaaattgatagatacataaataaaatatcaggtccattgttagataggtttgatatttttgtagaagttaattctataaaatattcagattttaattctttaaaacaagaagaaagctctcaaaaaataaagagaagagtagaaaatgctagaaaaatacagataaatagatttaagaaagataatataaaaaataatagtgaaattaaagcttacaatttatttaaatattgtaaactggaaaaagaagcttcaaaaacggctgagatgatatttaataaatacaacctaagcagtagaagttatacaaaacttttaaaaatggcaagaacaatagcagatttagaagaaagagacttgataaattcacagtgtattatagaagctttttcatttagaaaggcttattatagttattttaaatagttttttgaggtggattttatggaaaaaagagatacttatttatggttaaaatcaattggtggaataacaacaaaaacaattgaaataatagaaaatgaaatagtaaatattgaagatatatttgatttttctgaaaaagaaatatataatttaaaaaatataagcttgaatattagaaaaaatatagtaaaatatagaggttacgcttatttagaaaatataaaagaactactttacaaaaaagcgattaaatatatttgtaaatatgataaagaatatcctgaaaatttaaagaatatatacaacgctccaaagttattattctacaaaggtgacataggtttagttaataataattttaatatagctatagtaggttcaagaaaacctacagcctatggaattaattgtgcaaaaacaataagttgtcaactatcccaatatggagttaatatagtaagtggattagctataggaatagatgcatactcgcacataggttgtatgagtggaaaatctaaaactatagcagtacttggttcaggagtagacaatcctcttccaaaacaaaatttacatttatcaaataaaatattagaaaatgggggattattattatcagagtataatattaactcgacagtagccccgtaccatttttctaatagaaatagaattatcagtggtttaagtgatggagtagttgttgtagaagcagcaataaaaagtggtgcactaatcacagtagattttgctcttgaacatggaaaaaatgtttttgcaatacctggtaatataaattctcaaatgagtagaggttgtcataaaattataaaagaaggtgcaaaattaattgaaaatatagatgatattttaaatgaatataacatatttaatattattgataaaaaaataaatcaaaaatatgataatataagtctaaatgccaagtctaagcaaataattgaagctataaaaagagaaggaaacttgcatatagatagtatttgtgattatactggtatagaaataaagtatgtaaattcaataatcaatgaattagtactaaatgagttagtagtagaaatgaataataaaacgtacagtttaaatgtataaattaagattaggtagtgggggtgtatggttttatggccaaaacattagtcatcgtagaatcgcctgcaaaagctaaaactatagaaaaatttttagggaaaagtcattacacagttaaagcatcagttggtcatgtcagagatttacctaaaagtaaattaggtgtagatatagaaaataattttgaacctcaatatataaatataagaggaaaaggcgatgtaataaaagaattaaaaaaagaagctaaaaaatctaaacaagtatatctagcaactgaccctgatagagaaggtgaagctatatcatggcatttagctcatatactaaatttagatgaatctgaggattgtagaatagagtttaatgagataactaaggatgcaattaaaaaagcaattaaacatcctagaaatattgatataaatttggttgatgcacaacaggcaagaagagtgctagacagacttttaggttatcaaataagtcctatattatggcaaaaggttagaaaaggtcttagtgcaggtagagtgcaatctgttacaacaaagttaatttgtgatagagaaaaagaaataaaggcatttattccaaaagaatactggacaatagatgttgaggctaagacagtaaaagacaaagatataactttgaaattttatggtaaaaatgatgaaaagattgaattagaaaatgaagaagctgtaaatgaaatactaaaagaaatggaaggtaaagatttaaaggttgagaagatagaatctaaatcaagacgtaaatcagctccaaaaccatttacaacaagtatgcttcaacaagaaggagcaaataagttattttttactactaaaaaaacaatgatgatagcacaagaattatatgaaggtatcgacatagaaggtgaaggtactgttggtcttatatcatatataagaactgactctaaaagaatatctgatgaagcaaaagaaaaagctaagggttatatcgtaaacaatttaggagaaaactactataaaaacactggtgataaaaaagaaaaaaaggatactaaaaaggttcaagatgcccatgaggcaataagaccaacctcagttgatagaactccagagagtataaaagcctcattgagcaaagaccagtacaagttatacaatttaatttggagaagatttgtagctagtcaaatggaagattcagtgtttgatatactaaatgtagaatgtaaaataggcgatattgtatttaaggcaactggttcaaaaatgaaatttgatggttataccaaggtatataatttttcagaaagagaagacaaaattttaccaagtatagaaaaaggagatatattaaatatagaaaatatattgccagaccaacattttacacaaccaccagcaagatatacagaagctagtttagtaaaaacactagaagaactaggtataggtagaccaagtacgtatgctccaacaatagctactatactgaatagagagtatgttgaaaagcaaggaacaagtctatgtccaacagaacttggaataatagttactgatattttggaaaataatttccataaatttatagatgtagattttactgctgatatggaaagtaaacttgatgttatagaagaaggcaatacagattggaaaaagattgtatcagaatcatatgcaccacttaaagaggctattgaagaagctcttgaaaatatagaaaaagtaaatatggatgaagaaactgatgagatttgcgagaactgtgggtctaatatggttatcaaatatggtagatttggaaagtttatggcttgtaaaaactatcccgattgtaaaacaactagaccaattatgaataaaattggtgttaaatgtccaaaatgtgaagaaggagatattatacttagaaaatctaaaagaggtaaagctttttatgggtgttctaattatccaaactgtgactttgtagcttggaataagccaacaggagagttttgtgagaagtgtggttcatatatggttgaaaaagtgactaaatctgaaacaaaaacagtgtgttctaataaagaatgtaataaagagacaaaagagcataatgacggaaaagagtgaaaattgaaaaaaatcacataattctcttgaaaaaggttccaatctatgataatctttcaagtgtaaacaactaatagaaaaataaattttcattaaatgtgaaaataatattagaaaatataaaaggttattaaaaggcctaaatttcatgaggagatgattaaatggcaagtgaagtgttacaaaaaacaaggaaaataaataaaacattacaaacaagtggtggaagcagtgtctcttttgatttactggccggagcattgggcgacgttttaagttctaatgtttatgtagtaagtgcaaaaggtaaagtactaggtcttcatttaaatgatgttcaagacagttcagttatagaagatgagtatactaagcaaaagaaattttcagatgaatatactcaaaatgtgttaaaaattgatgaaacattagaaaatttaaatggtgagaagatattagaaatctttcctgaagaacatggaagattacaaaaatatactacagtagttccaatattaggaagcggtcaaagattaggaacattggtactttcaagatattcaaattcattcaatgatgatgatttagtaatagctgaatacagtgcaactgttgttggtcttgaaatattaagagcaataggtgaagaattagaagaagaaatgagaaagaaagctgtagttcaaatggcaataggcactctgtcctactccgagcttgaagcagttgaacatatttttgctgaattggatggaaaagaaggtctacttgtagcaagtaagatagctgatagagttggtataactaggtctgtaatagtaaatgcacttagaaaatttgagagtgcaggtgtgatagaatcaagatcattaggtatgaaaggtactcatataagaatacttaatgacaaacttacagatgaattaaaaaaattaaaaaacaatcaataatctatattttataggtttagattagaaaaggtatctatttcaaatagataccttttttagacgaattattaaggtaatgataagtatattaaaaaggagtgagaaaatgcctttagcagataaaataagaccaaaaacaatgaatgatgtaataggtcaaagtcatataataggtaatggaaaaatattgtctaagatattacaatctaattttttaccaaatatgatattttttggtcctcctggtgttggtaaaactacagtagcggaaataatagcagaaagaagcaataaaagcttctataaaataaatgctactaattcatctttagaagatataaaaaaggtgatatcagagcttggaagtataaataatgtaaatggagtcctattatatatagatgaaatacaaagttttaataaaaaacagcaacaatcaatattagaatttatggaaaatgggagtataactttgattgctagcactacagaaaatccatatcattatgtatataaagctcttttaagtaggtctactgtatttgaatttaaacctttagaaaaacttgatatagaaaaaggactgaaaagagctgttgaagtattaaatgaagatagctatatggatattgagtgcaataataatgctattgaagatatagcaattctttctgatggagatatgagaagagccttaaatattttggaagtggtagtctattcaactaaaccaaataaggataatataacttatatagattcagatgtaataagggcatctacatttaataaaattataaactatgacaaaaatggtgatagtcattatgatattttaagtgcatttcaaaaatctataagaggaagtgacccacaggcatctatacactatctagcaagacttataaaaggtggggatttgataagtatatgtaggagacttttagtaatagctagtgaagatataggtttagcttatccaaatgctattgtaattgtaaaggcatgtgtagactcagctatgcaacttggatttccagaagcgaaaataccattagcagaagctactattcttttggctacatctccaaagtctaattctgcatgtatagcaataatgaaagctatggatgaactggataaagagtttgttaaggatataccaaatagtataaaggatgctcactattctggttctaaagaaataggtaggggttgtggatacaaatatcctcataattttaaaaatcattatgtaaagcaacagtatttaccagatagcataaaagatagtatttattacataccacaagaaaataaaactgagaaaaatataaaaaaatatttagaatatctaaatagtgatttttagactgaattttatgtatcgggggtagatattatgattataaaacttaactcaacttatcacagtagagttatgaaatacttaaaaaaagaacctgagtacaatttgtttataataggggatattgaaagatatggatatggaaataattttttaaatatatgggcagacgtgggtgaacatggtgaaataaaggcaatattacttaaatattttgaatttatgatgttttattctgatggagagtatgatgttgaaggtttttataatctacttcgtaatactaattacgaagaaatatctgggaaaatatgtgctgtagatactttagcaaagagattaggacttaataatttaaaggtagttgatttttgcaaacttcaaactaaaaagtttttgatagataataattgtaatgcaaaggttaagagaattaggcttggaaatctaaaaaagacagtgaaactttatgacttaatagatgaatttcacagtacaactttagagaatttaaaaaatggactaaggacaggtagaggatattgtatagagattaacaaacaggtggtgtcaatggcaaagagtacttcagaaaataggactcatgcaatgataattggagtaggaacacatcctaaatatagagctaaaggacttgctacaaaatgcctaattaaactatgttcagagttactgagagaaaacaaaattccttgtttgttttatgataatgaagaggctggaaagatatataaaaaactaggatttgaaaacattggaaaatggggaatttattcaaaataaaaaattaaaattaatcttgacaaaattagtagggtataataaaattatcttgaaagtaattcctactaaaacagtatgaattagatttctatatagaggtgataatatatgaagttgtctactaaaggtagatatggactaaaagcaatgtttgaattagcattaaatcaagacaatggaccagtatcattaaaatttattgctaagaagcaaaaaatatcagatcagtacttagaacaaatattttcatctttaaaaaaatcgggtctagtaaaaagtgtgagaggtgctcaaggaggttatttgctttcaaagaatgctgaagacataacagtaggagatatacttgtagtattagaaggaccagttgcattatctgactgtgtactagatgaagatgtatgtgaaaactcaaacatgtgtgtaacaaaaatagtttgggaaaagatgaaaaagggtatagaagatgttatagattcaattactcttaaagatatgataaatgactataacaaaaataaattagaaaatgatataacaaatattaaaaaatagatttggagatgaatgtaatggaaaaaagaagattgtatatggattattctgcaacaacacctattaaaaaagaagtattggatgcaatgatgccatacctaacagattattttggtaatgcatctagttttcacacattcggaagagaagcaaaagatgctttggataaagcaagagaacaagtagcagcccttataaatgctgaacctagtgaaatatattttacagcaggtggttcagaaagtgataactggacactagagggtgtagcttatgctaataaaaacaaaggtaatcatataataacttcaaaaatagagcaccatgcaatacttcatacatgtgaatacttagcaaaacatcatggatttgaaataacttatttagatgttgatagcgaaggaagagtagacttaagacaactagaagattcaataaaagatactactatacttataagcataatgtttgcaaataatgaaataggaactatacagcctattaaagaaatatccgaaatagctaaaaaacataagatattattccacactgatgcagtacaagctacaggtaatattccagtagatgttaaagaattaggaatagatttgatgagtatgtcttcacataaaatatatggaccaaagggtgtaggagctttatacataagaaaaggtgtaagacttcataactttgtccatggtggagcacaagaaaaaagcaaaagagctggtacagaaaatatacctgcaatagttggatatggaaaagcagcagaattagctaaggaaaatatgcaaaatcatgtagaaactttaactcgtcttagaaataagttaatagatggtgtgttagaaagaataccttacacaagagtaaatggtagcttagaaaatagattgccaggaaatgcaaactttgcattccaatttatagaaggtgaaggaatacttttattattagatatgttaggaattgctggttcaagtggttctgcatgtacttctggttcattagacccttcacatgtacttcttgcaataggtttaccacatgaaatagcacatggttcattaagacttacagttggagattttacaacagatgatgatatagattatatactagagaacttaccaaaagtaatagaaagacttagaagcatgtcaccactttatgatgatgcgaagaaacaaggtttagtaaaatagacagaaagataaagcataaaaaatagacataaattgagtaggaggaaaagataatgcaatatagtgataaagttatggaacattttatgaatccaagaaatatgggagaaattgataatgcaagtggtgtaggtgaagttggaaaccctacatgtggagatataatgaagatatttttagacatagatggagatgtaataaaggatgttaagtttaaaacatttggctgtggttcagctatagcaagttcttctatggcaactgaaatgataaaaggaaaaactataaaagatgcattagaacttacaaataaagctgttgcagaagctttggatggtttaccaccagtaaagatgcattgttcagttttagttgaacaagctgtaaaagcagctcttatagattatgctcaaaagaacaatatccatataccagaattggatggatatgttatagatgatgctcatgaccatgatgttgaagaagaagaataaaaataagtgattgtgttatgagaagtttacaatgattaaaaagaagtactaatgatataattaggacataaaaaatagctgtttttaaaatggctattttttattgcctaaattaagtattttaacttgatttagaggttaattagttaacaaaataatccataagattcaaataataaagatgattatttttttagaaaatagaacaagctatattttaaataagtacaatacttgctctatatggtataataataagtaatgcaaaagatgaggtgaaatttgtttatgaataaaaaagtaatgataggtatgagtggaggagttgatagctctgtagctgcatatcttttaaaacaacaaggatatgatgtcattggtgttactatgaagttgtggcaagatgatgatgttgttgaaattgaaggtggttgttgctctttatctgctgttgaagatgctagaagggtagcaaataaaataggtataccattttatgttttaaattttagagaagtgtttaaagaaaaagtaatagattattttatagatgaatatttggaaggaaaaactcctaatccctgtatagcttgtaataaacatataaaatttgatgatttttataagaaggctagacaaataggttgtgattatgtagctacaggtcactatgcaaagatagaaaaggatgaaagtacaggaagatatttgctaaaaaaatctgttacagataaaaaagaccaaacttatgcactttataatcttacacaagagcaactagagcatactttattgccaataggtgactatgaaaaagatagagtaagagaaattgctaaggaaatggggatggcagtacacaataagcctgatagtcaagaaatttgttttgttaaagataatgactatgcaaattatgtaaaaaaacattctaaaaagcgtattgaagaaggtttttttgtagatactaaaggcaatatacttggaaaacataagggtatattatattatactataggccaaagaaaagggcttggaattacttttggaaaaccaatgtttgtaatagacataaatccaataaataataccatagttcttggagacaatgaagatttatttaaaaaggaacttattgctaaagatgttaactttatatcaatagatacgttagaagaacccttaagagttcaagccaaaataagatattcagcaaaaccatcaccagctactattcatagagtaggagaagatactattaaaatagtttttgatgaagctcaaagagctattactaaaggtcaatctgtagtaatgtatgatggagatattgtagtaggtggaggtataatcgagaaaagtttataaaaacatctaaaaaattaaaaaaataagcaataaagtatattaagagtaaataaagtttataaaataaatttattgtatattaaaatatagtattgattaattttgtaaaatttagtaatataattagtatattaattaaaaaacaaatacagtgataaggaatagtaaaatatttgatgtcttacagagagagggaaatgctggaagcccttagaatatgatatttgaagcagccttttagtagcaatcttgaacaatttatcttttataaagaagatttaagtagagattgacggtagttacgttatagctaaggttttccgaagatatcatactttgtatgataattagggtggtaccgcgattgtcctcgcccctataaatttatttatagggacgaggttttttatttaaacgaaaaaataaaatttattaggaggaacatgatatggaaaagatgggattaaatgaaataagaagtaagtttttagaattttttgagtcaaaaggtcattatgtagcaaatagttattctttagtaccaaacaatgataagagtttgttacttataaactcaggtatggcacctttgaaaaactacttttcaggtgtagaagtacctccaagtgtgagaatgtgtacatctcaaaaatgtataagaacaggagatatagaaaatgtaggtataactgcaagacatgctacattctttgaaatgatgggtaacttctcatttggagattactttaaaagagagtcaatcaaatggggatgggaatttgttacagaatggctaaatataccagaagataagatatgggtgactgtatatgaagaagatgatgattcttatgatatatgggcaaaagaaatgaatttcccagaagaaagaatggttagacttggaaaagatgataatttctgggaaataggtacaggtccttgtggtccttgttcagaaatatattttgatagaggagaagaatatggatgtgacaatccagactgtaaaccaggctgtgattgtgataggtatttagaattttggaaccatgtatttactcaatttgatagagatgaagaaggaaattatagtctattagaaaacaagaatatagatacaggtatgggtcttgaaagaatgggatgtattatgcaaggcgtagacactatctttgaagttgatacaattaaatctatactagaagcagttgagaagttaacaggagtaaaatatggagagaatccaaaaaatgatatatcaataagaataataactgaccacataagagctgtaacattcttagttagtgatggagtgcttccatcaaatgaaggaagaggatatgttcttagaagactccttagacgtgctgctcgtcatggtaagttattaggagtaaaagaattatttttacagaaactaatagatgaagttataaaggtaaatgataaagcatatccagttttagttgaaaaagaaagttatattaaaaaagtagttggaatagaagaagaaaaattcaatgaaactatagaccaaggaacagaaatattgaactcttatatagaagtattaaaaaatgaaggaaagactgtcctaagtggtcaagaagcttttaaactatatgatacttatggcttccctatagacttaactaaagaaatattagaagaagaacatctatctgtagatgaagaagcttttaatgaagaaatggaaaagcaaaaagaaagagctagaaatgctagaggaaatatggatggagaaagttggaaggaagaccctctatcaaaattagaatctacagttgacagtacatttaatgggtatagtgaaatttatggtgaaggaactattgaagctatagttaaagatgatgagctagttcaaagtgcagaagaaggcgataaggtatctatagtactagataacactactttctatcctgaaggtggaggacaagttggagattgtggattgataactaatgaaaacttagttttagaagtattaaatactaaaaaaggtgctaataatagtataaaacatataggtataataaaatcaggaagaataagtaatggggacaaagtaaagacactcgtagatagagaaactagaatgtcagctgcaagaaatcacagtgctacacatttacttcataaggcattaagagaagtattaggagaacatgttaatcaagctggttctttagtaactccagaaagacttagatttgatattactcactttgaagcgatatcaaatgaagaattaaaagtaatagaagaaaaagtaaataatgttattttatcatctttagacataaaatgtgatattatgaatataaaggaagctaaagaaaaaggagctacagcactatttggtgaaaaatatggtgatgaggtaagagtagtttctatgggagattattctacagaactttgtggaggaactcacttgacaaatacttctcaagtaggaatgttcaaaatattatctgaaggtggagtagcagcaggtgtaagaagaatagaagcaataacaggaaaagctgtttatgaatacctaaaagaaagagatggaattatctctgaagtttgtgtaaacttaaaatctaaagaagataatttaattcaaagaataagttctttattagaagaaaataaaaacttatctaaagaattgcatgatatgaaagctaagatgagtttacaatcagttgattctatttttgattctaaagttgaagtaaatggagttaatttgataactaataaatttgaaggtatggatatggatacactaagagaaacagcagataatctaagagataagcttggttctggtgtagtagtacttgcaaatgtagtagatgataaagttaactttgtagttactgccactaaagatgtattagataagggaatacattcaggtaatattgttagagaagttgcaaaaatagctggaggaaaaggtggaggaagacctaatatggcacaagcaggagctagtgatgtatctaaggttgaccaagctttaagctatgcaagtgaggttattaagacacaagttaaataacattcactcaaggaggtttttagtttggaaaaagatttagactacactatgaaatttgaaggaataccagaagataggatgagtgtaggagatactattgattttgtatataaagcattagttgaaaaaggatataaccctataaatcaaattatagggtatctcctttctggtgattctagctatataactagtcataaaaatgcaagagctataattaaaaaatttgaaagagatgagatacttgaagaagtaatcacgcactatctgaatagaaagtaggtcaaataaatgagaaaaaagattatgtcgttgtttgcaatagtcattatgatttttgtatcaactgctagctatggttttgctgaagaaaaaggcaaggtcatatttattgatatgaataggaccaatcttggaagtatgatgaatattccaatcttgaaaaatgagatagaaaagagaggctatgtagctctcatgaatataagaggggatcaaggtactgatgatagaaggtcttatgcaagtatgggtgcaggaacaagagctagtgtaactactgaagactatatcaattttcaaaaagtagaccaagatactgctaaagcttttgaagtcgcaacaggtcaaaaagctaaagaaataaatgatttaggcattaatagatctataaatgaaaatcttgagtatggagaatatggagcaaatttagggtcattaggaaaaactttatcagaaaatggtttaaagacatctgtaattggaaatgctgatataattgaaaataatcaattagttaaaaatagaaacttatgtttagtagctatggaccaatatggaaggattgattcaggtaatattgataatattaataagaaagattctaaaatgccatttggaatatctacagactacgataaattactagatgaaactaaaaaatcctataaaaatagtgatgctatatttgtagaacttggagatacatatagattagatatgtatagattaaatctaaatgataatacttatggtacaatgaagaaaaatattgtaaaaaatataaataaatatcttgaacaagtattttctatggttggagaaaatgacactgtttatatagcaagtgcatttccaagtgacctagattataagaataagagaagactttctccaataataaaatttagtggagaagggaaaggtctactggaatctgccacaacaagaaaggctggaattgttgccaatttagatgttggagtagatatactaggtacatttggtcttgaaaataaagagatggtaggtagaagttatactttagtaaataaagaggacaatgttggctatctaaaatcactttatgaaaggatagtgtctatatcttcaataaggtcaactattataaatggctttgtaggcgtaatatctgcttcttgggtaattgccatgtttgcgattttctttagaaattatatgccacataaagagcgtgtattcaaagtacttaaggagtttataaaattaggcataataatgccactatcatttatgttagctcctttgatgaattttaaaactccaatttcaatatctttgggaatatttgcgactacgctaatattatacttgttaggtagaaaattatttaaggacaatgatataaagcacatgggattttttgcaacacttactattttagtcatagttatagattctgtatttggaacatacttaatgcaaaataacataatgagttatgatgctgtcataggagctaggtactatggtgtaggaaatgaatatgaaggtgtaactatagcaagtgcagtatttggcttagcagtattattacattataagaaggtatctaaattacttgttgtaattttttcgttaataatacttataactagtgcatatccttcaatgggtgcaaatgttggtggagctatatcagaatgtgtagcatatttgttgtttataatgcttatatatgacattaaaatagattttaagaaagctgtattattagctgtttcagctgtagttgtcgtttttgcatttgcagctttagatatactttcaggtagtgaatctcatttaggtatgtttgtacagagaattttcctaaatggaccaggagagatattacaaacatttggaagaaaaattcaaatgaatatgcaactagcacagacaagtgtatgggtaaatattttacttgtaggaattggagtaattgcagtacttatatttaaaccatctagacactttagaaagataatgaataattttccaatcttgtttaaagggtttattgcatctatggttggttgtataattactcttttagttaatgattctggaatagttgctgcatctacagcatctatatatatacttataccactaataataataaatataaatatgataatatttgaaaaaaacaactaaaaaattttttactgttcatataggatttaaataaaaaatgcaatatgattattaatgtaaactggatgcttacataaaaaatcatattgcaatttttatgattgattatgcaaaattctatgaagcaggaagcctgtgaccttagttatgagaggttcagaatatgtatttaatctatagaatataaatagataaaggaggaactatgttagatggaagaataatgggtcttgatgttggtgataaaactattggagttgctgtgagtgatttgatgggattaactgcacaaggtgtaaaaacaataaaaagagttggcaagaaaaaagatattgaagagttaaaagcaataataaaagaaaaacaagtaaataaaattgtatcaggattaccaaaaaatatgaatggaactttaggtccacaaggagaaaaagtaatcaagttttgtgaattggtaaaagcagaaacaggtattgatgtagagttttgggatgagaggctttctacagtagcggcagagaggtctttattagaagcagatgttagtagacaaaaaagaaaaaaggttatagatatgttggcagcagtaataattttgcaaggatatttagattttaaaataaattcataaaagaactataaaattgaatacttatgatatataatataaataataaaaataaaaataaatttgaggtgaatgacattatggaagaaaatataataaatttaatagacgaaaatggcgttgaaagccaatttgaaataatattaacattagaagcagaaggaaaagagtatgcaatattaatgcctttagatgatgaagaagctgaagaagctttaatctttagaattgatgaggatgaagaaggtgaaatattaatacctttggaaagtgatgaagagtatgaaactgttgtagctgtgtatactgctataatggaagaagaaggtttaaattacgacgaagatgaatcaaatggacttaactagataagtaattaagtttgtatataaaaatcagatatttattatatttgctttaattaaaccttattaattgtaaaagcatttatagtatatatctgtttttttgttttttattaaaaataccaaaaaatttatgaattttggtgaataatatatcttttatgggtatatatttatattatgagaataaattaaatttatttaaatgtcttgacaaaaaatgaattatcaattacaatattatttaataaagattatcaattgaaaatagtaagggtgatgttatggcaaatacaatggatttattaaaagacaagttaaaagaaactggttttaagattacgccacaaagaagagcaatagttgaaatattgcttaaacatgaccattcacatctaagtagtgaggaaatctatgatttagttagggttgactgtcctgaaataggcttagctactgtatatagaacaatgcagctattggatgaaataggattaatatcaaaactaaacttagacgatggatgtataagatatgagattagtctacataaagaagactgtcataatcatcatcatcttatttgtaaaaattgtggaaagataatggaagctaaagaagaccttttagacaatatagaaaaagagatacaatcattgtacaaatttaaaatacttgatcatgatgttaaattttatggattatgtgacgagtgtaatggagtaagcgattcagaagaataaacttctattgcttaatgtcgatggaagaatagtatagaacttttatattctatgctattcttccattttttattataaaccatctacaaaatgcaaatatacagttttcaagatgcttatagttttaatattgaaaatataattaatcctataagtacaaaaatgaatgatttttctatgaaattactaaatggtcctccaacagttaaaaaacctaaagaaattttcttttcgcttagcggataaaaaattggtattccttgctttgtaaataaatctcctaaaaacatatgacttgcataaccaatcgtaccataaaaagataaattattaatattagtgattaattctatctgttttagtaaaaaatatactattatagttgcaaatatgctatgagaaaaacttctgtgctttaaccagggaaaaattgacaacattagacaaaaaattgtaaaatatatttcaacttctatgatgtataagcatatagctaatagtataaatattaatgatagaaaaacttttcttagaaatgtgtgggttagttttgcttcaataattataattgcaacaaatgtaattattgcgcttaaataaaaattatcatttatatttattgaaataaagaaaataataatattaacagcatatataaaaattctatatatgtatttggatacattgttttttagaatgaaatttgagaccatagaattagatttatccaaatcgggtagtacagcaaaagtagctgaaactaaaatatcaactaaagatataggaattttaaatattaaagatgtttggatagctgttaagattcctattgcacaatgagttttaccacgcataaatcctcctaaattatccgatattaaatcatataatatttagaggatatcaaaataaaataggtttgtcaaaataatacgttaaatgtattttaaatatagcttaaaatatgatacgaattatggtacaataagaataactggtagcgagtgcgtgatttgatattatttatgattgtagaacgtgttaaaaaattaaatagacagaaggagatgatgcaattgttcaaaaagaacaccaacaagataaaggtaatggccttgggtggacttaacgaagttggaaaaaatatgactgttgttgagtataaagatgaaataattgttatagatgctggacttagttttccagaggatgaaatgttaggagtagatatagttataccagatataacttatttagtaaaaaatagggataaaataaagggtatatttattacacatggacatgaagaccatataggagctcttccatatatattaaagaaaataaatgtacctgtatatggggcaagacttagtataggtcttatacaagtaaaacttaaagaacataaaatgaataatgttaagttaaatgttataggtcctagacaagttataaagcttgataatatggaagtagagtttttgaaaaataaccatagtataccagatgcttactctattgcaatacacacagaccaaggtataatataccacacaggagattttaagattgacttgactcctattgatggagatgttatggatatgcatagaatctgtgagttgagcaaaaaaggagttcttttaatgctggcagatagtactaatgcagaaaaaccaggatttactatgtctgaaaagactgttggggtaggtcttgacgaattatttgcaaaaggaaatggcagaagaattatagttgctacctttgcatccaacatacacagattacaacaaataataaatactgctgaaaagtttaatagaaaagttgctatatcaggtcgctcaatggtcaatgtagtcggagttgcaaaagaattaggatacctagatatttctgatgacatgcttatagatttaaatgatatatgtaagtatgaagatagtgaattagtgataataacaactggttcacaaggtgaacctatgtcagctcttgctagaatggctttttcagagcacaaaaaagtagaaataaagagtggcgatttagttataatatctgctcatccaataccaggaaatgaaaaattaatatcaagagtaatcaatttcttatttgaaaaaggagcagaagtagtatacagtgatatagctgatatacacgtttctggacatgcctgtcaagaagaattaaaacttatacatgcattagttagaccaaagttttttatgccagctcatggtgaatatagaatgttaaaaagacatgctgaaatagctgaacagcttggtatggataaagaaaatatttttgtcatgcaaacaggagatgttttagaattagataaaaactctgctaaggtagcaaaccgtatacaaacaggaaacatattagttgatggtctaggagtaggcgatgtaggtaatatagttttaagggatagaaagcatttatcagaagatggtcttatgatagttgtagttactatttccaaggatgagggtaaggtcttagcaggtccagatataatttccagaggattcgtatatgtaagagagtcagaagatttaatggatggagcaaaggatataattaagaatgttctaaatgaatgtgaagagaaaaatattaaagaatgggcttatttaaagaataatattaaagaaaacctaaaagaatatttatatcaaaaaactaaacgaaatccaatgatacttcctatcataatggaagtataatataaaaaaactataaatttgaaaattagacctcttgtaatttttaaagtaatatcaaaaatccaattgatattatcttaagaattacaagaggtctttttaatactcatttaaaaaaaatatatattacataaaataccaattataacaatcttttattagtaaaaactacttatatataaattttactgataggaggattcttatggatgatgtttcaagacaaaatgctataaaagctttaaaacaaacaaaaatggaaatagcaggagagtatggaatgaattatgaagatgcttttgaaataatagaaaatgcgtctaataaaggtgttttagaaggttactttaaaaagcttgaaaagaaaaaaaatttaggtcaaggtatatctaggcatttagaataaaaaaagttaaatgtgagaaaataagtttaaataaactttaagaggtgacatcgatgaaaaaattagctagtactgctttggctatattaattgcgcttactcctttaagcttttcttttgcaaataataaggaaaatgctgatgccaaccaactaaatatatcttcaaaatcagcaattttgatggatgttggtagtggacaaattttatatgaaaaggatgctcataaaaagcttcctcctgctagtgtaactaaggtaatgactatgctacttatagtagaagctttggattcaggcaagattaagcttgatgatgaagttcaagtaagtgaaactgcatctagtatgggtggtagtcaaatattcctagagccaggagaaactcaaaaggttgatacattattaaaaggtatagctgttgcttctgcaaatgatgcttgtgttgctatggctgaacacttagctggaagtgttgaaggatttgttgatagaatgaatgctaaagcaaaagagttaaatatgaatgatactcattttgcaaatacaaatggacttccagttgcaaaccactatacatctgctcatgatatagctttaatgtctagagaactattaaaacacgaaatgataagtaaatacttaactacatggatggataaggttgtagtagggaagaaacaagttacagtaggtcttgcaaatactaataaacttataaagcattatcaaggagcaactggtgttaaaactggttttactcaagaagcaaaatactgtttatcagcatctgcaaagagaggtaatactcatctagttgctgcaactttaggagcagagacttctccagaaagatttaatgatgcctctagccttttaaactatggatttgctaattatgaaagtgttaagttatgtagtaaaggtgataatatagcaacacttacattggataaggctgatgaaaacaaagttaaattggttgctaaagaagatttaaatgctcttattaaaaaaggaagctctaaagaatttgagaagaaaattgaaatagtaaaaaatcctaagatgccaattaaaaagggaactgttttaggaaaaataaagatatgtaaagataaaaaagtaataggcgaagtggaattgataaatactaaggatataaataaggcaagctatctacaaatgcttcaaagaataattgataatatgatataaataattatcagatgaaatataattataatacacaaagatatgattataatacacataaaaaatacccttatgtagttatttgccataggggtatttttatttaccatatagaagtattttataatcttatgatttttatagaaatatagaaaagtttatgtatcttaaaatatcatttgatttaatatcatatatagggttgtttaacaattatctaagtaaaggcatactaccagtaagtttattcactttctttttattcccataaattgctatcccaaaatactgtaactcatcttctggaacactagcaatcttttgtgtaaattcttcataaagattgcaactttgtgctacatctgaaaaatctacaacagttaaatcgttaaattccaaagtatataattttttacgtaaatcttttattatttctttgtttccttttaaaataggtacaggaatgtcaataattcctaagtggctattacctgttttgtcaattacatctggcccaacagtttctggggcatgttttcctagtgtaattcccattatagctgctgtattggatataattcccattggtaaattttcgtctattaccatgacacattttgaatttttattttccatttttatttctcctttttaccttatttaaagttgtttgaatcatcatttataaatatattttgatactgctttggtgtaagaccaataaaattcttaaaaaagtttgtaaagtgactttggtctacaaatcctgtttgtatcgcagcatctataggttctacgcctttttctaaaagctttttagctttgtttacccgtatattttctaggtatctatatggtgtaataccttttaatttcgtaaaattacgaagtagagagtacttattcatacctgctatagtgcttaattcgtcaagtactatatgttcagcataattattttctagataatcacatactgcttgaatttctatatttgtattttccaagttagattgcaaatttggctctgtatgttcttcaattaattgctcaattaggaagaaaaaaagctcttcctttttaaaatccaattcttcttccatgattatatagtgtaattcttgtagtagaggtactagctcactgcgaaatataacaggttgattaaattttggtaaataatttttacctgtaatttcaaagacggtttttttcattatttctggcttaatattgatacatctgtaatcaagtactttatcatctatttgttcacaagtatgactgtcaaaagggttaaaaagtagcaaatctccagtacttgtggtatactctttatttttacaagataaatatctttgacctttttctataaaaccaattacataatgttcatgaaaatggtttgggaatttttgcattatgcctttaaatctatatgcttcaatttttaattccctatcaaagcatactgtgcgttcttcttgtctcacttaggtaacctcctttcatgttatacaaagtgtaacacatatttttttatacttcttgtataatattgactaagagacaataatgtcaattcatgtcaatataatattacacttacagtaggtgtaattattatattttcacaatgaatatgatataataataaaagttataaaataaaaagcaaattttaattttatgcctagaagttaaaattattataatgtaaaataattttgattataagctatttaattgttataataatattaaaaatttaatttaggagatgtacattaatgttaagtatgaatataggagaaatagtagcaagtttagttggtatagctatggcaatatcaatacatgagtttggccatgcttattcagctcacttattgggagatgatacagctaaagcttatggtagaatgacattaaatcctgtaagacatgttgatccaataggtcttttggctatgtttatccttaagatagggtgggcaaagccagtaccagtaaatccaaataattttaaaaactataagataggaaacctgatagtttcacttgcaggcgttttttgtaatgttttgactgctatactgtgtgtaattatcaataagtatgtgcatatgtatgctataaatacaatagctggatatgtgcttatatatagtatgggatttgcagcttttaacttacttccgatacctccacttgatggatggggagttatatctacatttgtaccatataaatggaatgaatatttgtataaatttgaaagtatgagttatataattttattaattgctttatttactggtatatatcaaataatactatcaccaatatatacagtgttgctaaaaatagtatatttatttgtttaatataataaacagattaaagagggattgatatgaagtataatatacaattacaagtctatgagggaccattagatttactttatgatttaataacaaagcataaaatagatataaaggatatatctataatagatataactaagcagtatctaaattatttgaaaatgctagataaaatggatttagagataactagtgaatttataactatggcatcaaaacttttagagataaagtctaaatatctgctttataagcaaaaagatgaagaagaagacccaagaatagaacttatggaaaagttagaagaatatagaaagtttaaggtagcatcacaagatataaaagaaaatataacttatgttaatgagagattttatagaaataaagaagagataattattgatgacaatgtggatttagaagatatatcaattgaagcaataaaaaatatacttccatacatatttaaagttaaaacatcacagatagaaaatgctaatgatgagaaactagacaaaatagtaaggaagaagataatatctgtggaagaaaagatattgtatataagagatattataaaagataagattgaagttacttttacaaatattataaaatcatatgaaaatgatgaaataatagctacttttttatctatattagagcttataaaagaaaaagaaatagtagtagtacaagacatattttttgatgatattctaataagaaaaagttcggagtgttaaaatgaaaagagaagatataaagtatattatagaatctgttatgtttgcatatggggaaccaataagtataaaagaattaaactatataataaataaagaactttcatcaaaagaaatagagattatgttaaatttacttattgaggagtacagagaacaaaatagaggtattcaaataatcaagctagagaataagtaccaaatgtgtacaaataaagactatgcagaatatataaagaagattattgaaccaaagaaaaagaaaagtttgagccaagctacattagaaactcttactataattgcctacaaacaaccaataacaaaggtagaaatagaggatataagaggagtaaaatgtgataaggtattacaaactttgtttgaaaatgaacttataagagaagctggtagattgaataagatagggaaaccaataatttataaaacaacagatgaatttttaaagttgttgaatatagaaagtcttgaagaattgccgcctatagaaaattatcaagaagtggcaacaaatgaataaaaatataaaatcacaataatttagtatgtaattttaaattttaaaagatttaaaatgctctaagttgttgtgtttttttgtataaatataaaattataattctcttaaaataaatatggataattaagtataaatagtaattttttgatgataatataaacatggagcttaatgaattatttaattttaagtatttaataatagctgtaatttttattataagtgtaactatgttgattttaatatctcatataaacatcttaataatagctgatataaacaacaaagatatttgtttaaagcttaatataaaatacatgtttaatttaataaatataaatagacaactttatccagctgaaaatagtaaaaataatgataaaaaagaggggatgaagaataatatagattcaagtatattattagctgatgaccttttgagcatttatagattattaaaaaagataaaaatacatgaactttattcaaatattaattttggaactggaaatattggcttaacatcttctgtatatgtattgataaatactttgtatggaaatttatttaatatgattgatgcagaaaaaatgtatttaaatgtaaatccagattttacaaaagattatgttttaggaaatataaggatacatataaggccaagaataaaagctttatttaatattataataatgattaataaaattatgaataaaaataaaggaaataaggaaggtgatagtaatgagagcaacaggttcgatacaaagtcttatggaaacaactcttgaaacaattaaaggttctatagatgcaaatactattataggagaccctataaaaacagatactacagtggttgtacctatatcaaaggttacaattggctttggtataggaggaggagaatactcaaaaggatatgatgataaagatagggaaattgaattaaaaaatgaaaaatcagatacgaattttgctggaggtagcgcaggggctatatctgtacaaccagtagcatttgtagtagttgaaagtggagagactagaataatgagtttagacagtaatatcaatctagtggataatatattatctataactcctagagtattggagaaaattcaaaatatatcacaaagtaataagaatcaagataaaaacaatatgtaagaataaaatatttttaaatatgtatatagttttaagtaaagtagtggggttagtataaatcccactattttgttgtgtactttaaacatttatatctaataagattttagtttaaaacaatttaaatagataataaagttgatatatagtataattataaaaagaaaagaagtattatattatagatatataaacgcatttgagatataagagggagttataaatcattagttttgaggtgaatgttatgagcgataaagaattatctattttgttgttagaaagtatgaataattttcataatttaataaagattattaataacgaaagatataaaaaagataaggttcttacagaaagacagttctttgccttagtaaaaataagaaaacatgataaaatagagcttaaaaatctaagtagagatttacatgtatctacttctagtctgtgtatactacttaataaattggttgagcaagagtatgtatatagggaagaagatagtagagatagacgaaatactttttatggaataactaaaaatggagaaaagatattggataatgaaatactaaagtttgtatctataataagtgataaaatggattgcttagatatagataataaagataaattatttacttctttggaagagtctaaaaatataatagaacaattattttaaaaaggagaatttattatgaatataaagtattctaaagagatattaaaaagtttagaaaatgctataacagtagtagctctatttgagggagaagatgtttctacgacatttgataaaataaatatgataagcagaaattttaattctaaagaaaatagtatagatactgtaacattggttgaaaataacaacttggtaaatgtttgtcttgttggttttggtaagagagagttattgaatagagaaaaaattagaatcataggtggtaatttgtgtaaaaaattaaaaaatatattgaaaaatgaagcatataagagtagtgatgttaatgtacttaatcttaatttaaatagtgatgaaataggttcttttgtagaagggatattacttggaaattataagtttgataagtataagacaaaaagtaaggattttgaaagaaaagaagttgatactataactatatttactgaaaaagaagttgagtgtcaaatagaaaaggctaaaatattagctaattcaactataatagctagaaatctagttaatgaaccatcaaacgtaatatatccaaaaacattagcaatagaaacagttaaacttggtgcagagttcgggtttaatgttgatgtttatgaagaagaaaaaataaaggcattgggaatggatgcttttttcgccgtttcaagaggttcaatcaataaaccaagattcatagtaatgagatactttggagataaagaaagtacagatatattaggtctagtaggtaaaggattgacttatgatactggtggatattctttaaaatcaaatgcttctatgctagatatgaagacagatatggctggtgctgcgagtgttataggtgctatgtgtgctatatctcaaagtaaattaaagaaaaatgttatagcagtagtggctgcatgtgagaatgctttatcaggaggttcatacaaacctggagatataattagttctatggcaaagaaaactattgaagttttaaatacggatgccgaaggtagacttacattagctgatgcaatatactacattataaacaatgaaaaagtaacaaaggtagttgatgtagctacattaactggtgctgctttaacattgttaggaaatgttgcaactcctatagtaacaaataatgatgatttttattgtgaattagaaaaagctgccactttatcaggagaaagggtatggaagatgccaatttatgatgaatttaaagatatgataaaaggagaagaagcagaccttaaaaacactggtggtaaaaatgctggatgtataacagcaggagcttttattggtgaatttgttgggaatactccttggatacatatggatatagcggggacaagtacatcatcaaaatcaattggatacaaagcaaagggggctacaggagaacctgttagaacattatactatttggcagaaatctaaaaaacaattataaaatataatttataaagccacatggatatttttgtaatttaagattatctatgtggctttattttttatttaagtaaattatttactctttttctttttctcaagtataaaagtatctctattaaataaaagagcaggtatgtacataatactagtaacaaaaataaacgtaaaaatagcagttgtgctatgacttaaaaaaccataatagtattgtgagttggtaaatgtgtttagtaaaaatatgaatgaaaaataaataaaacatatagctaagttatctctaagtgcatatctgttaactctaaattttctaacatcaaccatatatatatctgcataaattatcaagcacttagagaagataaatataaaatatattaagctaggaaattcatagcccaagtttttagaaaaaatgagttctccaactgaacaaactaaactccaagaaaaaaatatattaaaaagatgatactgcttaaaaattagtatggctatacacagatatatacagatataattgattccaattggtaaagagtttagagtactataattacctgaagaaataagtaataattgctctagagccataattattacaagtaatgtacaaattatcttctcaactgtatagctataaggtaaaatatttttggttagttttggacaatagtataaaaataatccaaatataaagagacttacaaattgttcactagaaaaaagaaaaattttaaacatataacattctctcctataataaatttaatatgtatctatataaatatattcattatatctcaatttaatatataaaaaagataataatagttagactttttatatgaattttaataggtaaaatatcctattgttttgtagatatatcctaattatgtcaaaaaataaaaaaatttttatttattagagtttttggaaataataataacagatattataattaattaacagtttttgtaagtatttgacaatagagagggtgtaacaaatgggaataatagagtcagcatcaaaattggctgagatggttcatttattggctgttgaaaaggggataactgatatagaagcatgggatgaagctgtgaaagaatacagcaaaatttatgaagaaagaagaaatgaatagaatgataaaaaatgaaaacttgatgataaaaaataactttatttaaagaaattcaatttttatagaaatattaaaaataatataaataaaaagatggtatttcaaatgtaagtaaaaaatcattttgggataccatccttattatttattttaataatatataagtaataaatcttacttatccatattttttatgtaacctcttttttctagcttttttatatgctccttacgtatttcatcaagattaataccatattgttcttctagcttaaacatcatagtaacacatgtctgagctacatccattagttccttagcagttttctttataatatcaacttcatctaaatcattattttctccacttagatttctgaatttacctatacattcagctaattcaccttgttcttcacccattttgataaatgtagattctagtgttgggtctaaattattaagctctggtaaagatatagtttttagtttcataaaagctcctttcaagttattcgtatttatactaaaacatcataacaaaaataatactaaaaaaaaactttaaattcaacataaaaacttacatatataataaaaatcgtgaaataaatctatatttgtcttaatacagcctcatataaaacttctccaataggtttatttattacaagagaagctgacttatcatagactgtatttgctttattaataagagcaatataatcacctttgtaataatctataaaacttgctgctgggtacacagctaatgatgtacctcctataatcaataaatcagcattacttatagcagaaattgttttagtaatgacatcactgtcaagagcttcctcataaagtactacatctggttttactatagaaccacagttgtcacaataaggaatattacctcccagatttaacatagattctaagtcaaaaaacttaccacatttagtacaataatttctatgtacagaaccatgaagttctagcacatttttacttccagccatttgatgaagtccatcaatattttgagttatgacagctttaagcttacccatttcctcgagttttgctaaagctatatgagcattgttgggttttgcattaggatatattaatttatccttataaaattcaaaaaattcttctggatatctaacaaaaaaagtatgtgaaactaattgttcagcagtaaattgtttattgagtttttggctaaataatccagtagaacttctaaagtctggaatattagattcagttgaaacacctgctccaccaaaaaatacaatattattgtgattagctattaagtcttttaagctatttgcatccatagttacacctccaaattattatatataaattgtactacatattaggtcttttatgttttattaatttaaataaatatgtagtttaataagttaaataaagggaatataaataaaatgtatacagagtataaatagacaatatttactaaaataacaagttgtcgtataattatattaaaattgttttagtgtataagaagggcgggggaagtacgtgaagaaaaaagcagctttagcaacattggctatgttacccttaggtgtggtaaatgcacatgctgatggagatataggtatagtgactataaattatttaaatgtaagaaatgagccaactgccgaaagtagcatagcctttgttgctaaaaaagatgataaagttttgattaaagactcttctaatggatggtataaaataaaagctgaatctggacaagaaggttgggcttcatcaaaatatatagcaaaatcaaatagtgactctttaagaacgtctacaaataaagaaaaacaagttatttcaaatagtttaaatatgagaaatggagcaggtacaagttacagagtaataactgtactaaaaaaaggtcaaaaagtagaagtaatatcagagagtaatggatggtctaaaatcaaatatgatggaagactaggatatgtatctagctcttatttaggagacgtttcaaattcaactaataaatcaaaaactaaacaagtgaatacaacttcactaaatgtaaggagtggaccaaatacaagttatggtttgttaggcaagttgccaaaaggaagtaaagtagaagtaatatcagaaagtaatggatggtccaaaataaagtataatggaaaagatgcctatatatctagtatgtacttatcggatgtaagtcaaagtaattcagacaattctagtcaaagcaatgataaaaagaatactgataaggttgtaaatacagcttctttaaatgtaagaagtggaccaggttctacatatagtaagttgggaaaagtttataaaggaagtaaagtaactgtactatcagaaagtagtggatgggctaagattaattttaacaataaagaagcatttgtagtaggcaattatttatctacttcagcagatacttcaaataataactcaaatagtaactctgataacagttctaatagtaatggcaataattcttcatcatcaggtcaagtaaatggtatgtcaggtataagtggggctaaaattgattataaatctttgagttatactttagaatctcatataagtaaacaagttgagaaagcagcatcaggaggaaatgtgatagctccaagtaataggaaaagcactccaagtcctgaatttagtactttttcagctcaaagaacaagctcatttgtaaatgcaagttcaagtgatatagaatattatttaaatcctaaaaattttacaaatactactaaaggtatgatgcagtttttaaagattaacagttatagagatggtatttcagaatcaagtcttaactcgtatcttaatggtttatcttctagtgtatttaaaaaccagggagcagcctttataaatgctgccaagaagtataatatagatgttgtatatctagtatctcatgctatgtgggaaactgcttatggtaagtctacacttgcccaaggtcaaacattaacatcttataagggacaacctcttagtaagccagttaaagtatacaatttttttggtataggagcaatagataaaagtgctaatgtttcaggtgcagaagcagcgtattccaatggctggactagtgtagaagctacaatagatggctctgcaaagtggatatcacaaaattacgtaaatagttctaagtacaatcagaatactatctacaagatgaagtggaattatgattatacatggcatcagtatgcaactgatgtaaactgggctaatggaatttctggaattatggaaaatttaattggtctttatggaggaggaagtagtttggtttttgaagttcctcaatataagtaatacataaataaaaaatatagactatgggtagttttcattttatttaaattatctatagtctttttgtatataatttataatctgtaaatttaatgttaacaaaacttttatgttataatattaattctaagtaaatataagtgagtaataggtagaaatagataaaaagtggtaataatatatataaagataattttgagaaaggaggatatatatggaaagtattaaggaatatttggataagttagaaattaataatagtggtcttggaaagcaacttaaagaagtttatataaatagagtagtttattttaaggaagataagatagtttatttttatctaacttctaaagatattgtttctcatgaacttttagataaatttaaagaagaattgatgtataaactcgattattttaaagatatgaggatgaagataagatttactggtcttgaaagaaaatccaataaagatgttataaaaaaatattggaataatatattgtatatattaaagtatctttgtccatctattgcagggtggtataaacaagtagaatttctttgtttagaagaagaattaaaaataaaacttccaaaaggtatattttatgagcgattaatgaaaaaaaatgtaacttatgtacttaaaaccgtgcttagcgaagagttgggattagatttaaatataacaatagaaaaagctgttgatgaaaaggtaaataaagaaagactcataagaatcaatgatagagaaatggaagaaaaaattagggctttagaaattggaaaagttaataactgtgaagaaaatgaagaggaaagctatgtcattaagtctgatgtagatgaaaatttaatctatggagataatgcaaatgctatgattgaaaatatagttgaattaaatgcatcttctggaacagttgcagttgttggagatatatttgatgttgacactaaagaacttaaaaacggaaaaatacttatgatagcttcaattacagattatactagctcaataagctgtaaactttttttaacagatacaaataaggatggagtacttgaaaatgttaaaaagggagcatacttaaaaatcaagggtgacatagtttatgatacatatcaaagagaaattagtatgatgattagtgggataagaaaagaaactagaatagagagagaagataaatcagaggaaaaaagggtagaactccatgcacatacacaaatgtcttctatggatgctatttgttctgttaaaaagcttgtagagcgtgcagccaaatggggtcattctgctattgctataacagaccatggtgttgtacaaggatttccagatgctatgaatgcaggtaagtcaaataatataaaaatactttatggagtagaagggtacttggttgaagatgattctctcattatagaggatgcaaatgataaagaactttcgcagacatttgttgtatttgacatagagacaactggtttttctaatacaaatgataaaataactgagattggtgctgtaaaaatagaaaactttaagattgtagatagatttagtgagttaataaatcctgaaaaagatatttcctataagatacaggaattgacaggaataactaatgaattaattaaagacaagccaaccattgaagaaattcttcctaagtttatggaatttgttggagatagtgtattagtagcacataatgcagagtttgataccggatttatatcgcaaaaatgtagggaacaaggcttgttatataataacaaaaaagtagatacacttatgttagcaagagtaatgttgccaaacttaaaaagacatagattaaatgtcgttgcaaaagaacttggtattcctcttttaaatcaccatagagcagtggatgatgctgaggctacagcacttatatttaataagtttttgcagatgcttacagaaaaaggtgcaaaaactctaagtgatgtaaacaatatacttggaaagattgattacacaaagcttagcacaaatcatataaccttgatagcaaaaaattctataggtataaaaaatttatataaaataatttcagatgcacatgtaaatcatttttttagagcaccaagaatccttagaagtgtattaaatgaatataaagaaggattaataattggttcggcttgtgaagctggggtggtttttcaagctgtaaagaaaaacgtgtctgatgaggaaatgaaaaaaataatagatttatacgattatattgaagtaatgcctatagataataatagatttatgattgataaaggagaagtaaaggatgaagaagagttaagggagttgaataggaaattaattgatacagccaaaaaatttgacaaaattccagtagctactggggatgttcattttttagacaaacatgaagctgtcttaagaaaagttcttaaatattctcaaggttttaaagtagatgaagaagaaacttatttacattttagaacaacagatgaaatgttggaagagtttagttatcttggagaagaattggcatatgaagttgtagttgaaaatagtaatctgattgccgatatggttgaagatataaaacctataccagatgatacttatcctccaattatagagggctcagatgtggagttaagagaaatgtgttacaaaaaagccaaacgaatctatggagacccaataccagaaatagttcaaaaaagactggatagagaattaaattcaataataagcaatgggtatgcagttatgtatattatagctcaaaaactggttgcaaaatctctttcagatggatatttagttggttcaagaggctcagttggctcatcttttgcagctactatgagtgatataacagaagttaatcctcttccagcacattatatttgtgaaaacgaagactgtaaatattcattcttttatgaaataggtgaatggggctcaggtgttgatttaccagacaaggattgtccaaagtgtggaagaaaacttgctaaaaacggtcatgatattccatttgaggttttcttaggttttgaaggtgataaggaaccagatatagacttaaatttctcaggaaattatcagccaacaattcataaatacacagaagaactatttggagaggggtatgtatatagggctgggactataggtactgtagcagaaaaaacagcttttggatacgcaagaaaatatgtggaagaaaataatataagtgtaccaaatgcagaagtacttaggctttcaaatggatgtactggagtaaaaagaacctcaggacaacatcctggtggagttatggttataccagactataaagatgtatacgattttacacctatacagtatccagcaaatgatacttcttgtggtgttataactactcactttgattatcattcaataagtggtagaatacttaaacttgatatacttggacacgacggtcctaccattataaggatgcttgaagatatgactggaataaatataacagaaattcctttagatgataaagagactatgtctctatttacatctacagaagcattaggtgttacaccagaagaaataaactgtcctataggttgccttgctgtaccagagtttggaactaagtttgtacgacagatgttacttgacaccaaacccactacatttgcagaacttgtgcgtatatctggtctctctcatgggacagatgtttgggtaaataatgcacaagacttagttagagaagatatagttggattaaaagatgttatatctacacgagatgacataatgaactatttaatatttaaaggattacctcccaaaatgagttttacaataatggagagcgtaagaaaaggtaaaggtctaaaaccagaacacattgaagaaatgaaaaaaaataatgttccagaatggtatataggctcatgtaaaaagattaagtacatgttcccaaaagcacatgctgttgcttatgtaatgacatcatttagaattgcatattgtaaagttcactatccagaagcattttatgcgacttattttacgacaaaagttgaggattttgatgcagatttaattgttaaaggattagatgctataaaatcaaaaataaatgaaattgagtcactgggaaatgatgcaaccacaaaagaaaaaggtatgttgaccgttttagaagttgctcttgaaatgtatgctagaggaataaaattattaccagttgatatatataaatcagatgcaactgagtttatagttgtaggagaaaaaacattacttccaccaatggcagcaatacaagggcttggaggaaatgcggctataaacatccaaaatgaaagaaaaaatggtgaatttatatcaaaagaagatttgagaaagagaacaaaaatatcaaaaacggtaatagaaactcttactaatcatggttcacttgagaatatgagtgagagaaatcaattgtcattgttttaagttagcccaaaaagttgcaaataaaagaattttatgatatcatagtatagaaaatagtatactttgcagaaactaagagtgagacagctgttctcactcttttattttaaatatattattaaaaagttggtttatttttattaaatatattttatttaagattatataaactaatcatttacaattgaataggaggaactttaatgaaaaaaaatttagaagctacaattgaggagattgtaactaaaataacggatgaacatggatttgaaatggttgatgttgaatatgtaaaagaagcaggagaatactacttaagagtatacatagataaagaagaaggaatatctttaaatgaatgtgaattagttagtagagaattaagtccaatactagatgaaaaagaccctataaaagaaaattactttttagaggtatcttctccaggacttgatagagcattaaaaaaagacagagattttgttagatatcaaggtagagatgtagatttaaaattatataaaccattaaatggatgtaagcaatttgaaggtgaacttgtaggattaacagaagataataatataaaaatcattgcaaatggtaaggaaatggaatttaatagaaaagatgttgctattgtcagattagcaataaagttttagtggtatattaaatagggaggatataaaaaatgaatcatgaatttatggaagcattagatgaattagtagttgacagaggtatagataaagaaatacttatagatactatagaacaagctcttttaactgcatacaagaaaaactttggttcagcacaaaatgttagagttgaatttgatagagacaagggagatataaaagtattttctcaaagagttgttgttgatgaatcagatttatatgatactttcttagaaatagagttagcggatgctagagagataaaccctaattatgaattaggtgatattatagaacatgaagttacacctaaaaactttggaagaattgcagctcaaacagcaaagcaagtagttgttcaaagaataagggaagctgagagagaaatagtgtataatgaatttatagaaaaagaaaatgaaatagttacaggagaggttgctagagcaaataaaaatgttgtttatgtaaatcttggaagaatagaaggtataatgactcaaagtgaacaaataccatttgagaattataaagcaggtcaaaaaataaaattctatatacttgaagttaaaaagactaacaaaggacctcaaatagttgtatcaagaagtcatccgggtctagtaaagagattgtttgaagaagaagttcctgaaatatatgaaggaatagttcaaataaaatctgtagcaagagaagcagggtcaagaactaaaatggcagtaaaatctatagatgaaaaaatagacccaattggagcttgtgttggaccaaaaggacttagagtaaaaaatatagtggatgaacttggcgatgagaaaatagatataataaaatatagtgaagacccagcagagtttatatcagcagcacttagcccatcaaaagttgttagagtagatatagatgaagatgaaaagtctgccttagtaatcgttccagattatcagttatcgcttgctataggtaaagaaggtcaaaatgcaagactagcagcaaaattgactaactggaaaatagatattaagagcgaatctcaagcagaacaagaaatgttaaatcttgaaaattccaaagaaatagaagctgaggatgttgaagctgaatttatcgaccaagaagagttaggtacttcagaggataattttagtgaagaagagtaaggagggatgattttgaaaaaagtaaaaaaagtgcctcaaagaaaatgcatagcatgtcaagatagagactctaaaaaagagcttataagaatagttaaaaataaagaaggaaaaatatttttagacccaacaggaagagccaatggaagaggagcatatgtatgtaaaagctctgaatgtctaaaaaaagctataaagagtaaagcattaaataaagcttttaaaatagatgttccagatgaagtctatgataatctacttatggagttagaagaatatgaaaaataataaagaaaaagtactttcgttcttagggctcgcaactcgtgcagggaaaatagtgtctggtgatgattcaactttgcttgaccttaaaaaaggaaaagtaaatttgattttaatcgcagaagatgcatcaaataatactaaaaaactttttaaagataaatcaacttttagaaatattccatatctatttttttcaacaaaagaggaaataggatttgcaataggaaaatctccaagagcagttgtaggaataaaagatgaaaatttttctaaaaagataattgaactaatagaaatttaaaataaaatagggggtgatcttgtgtcaaaaacaagagtataccaaatagcagaagaattaaatatatcaaatgaagagcttataaataagttagctgaattagatataaatgtaactgacaaagattcagtattagaaggtgaagagttagaattagcacttgaaatgttaggtgaagatttatctcaagaaaatggaaatgttatagaaatagatggaaagttgacagtacaagtattagcaacgaaattagataaatctccatcagaaataattatgaagcttatgaaaatgggaactatggcaacaataaatcaagagataagttttgagattgctgctttggctgccaaagactatggatttgaattaacagtagctgaaagtgatgatacagaagctttagaaatagaagctttaatggaaattgaagaagataaagaagaggatttaaaacctagaccaccagttgttacagttatgggacatgttgaccatggtaagacatctttactagatgcaataagaaaaactgatgtgatttcaggtgaagctggaggaataactcagcatataggtgcttcagaagttaaaatcaatggacacaaaatagtatttttagatactccaggacatgaggctttcacatcaatgagagcaagaggagcacaagttacagatatagcaatattagtagttgcagcagatgatggtataatgcctcaaacagttgaagctataaaccatgctaaagcagcaggtgtacctttaatagttgctattaataaaatagataaaccaggtgcaaacccagataaggttaaacaggaattagcagaccaaggattattagttgaagactggggtggagaagtaatagcagttccagtatcagctaagaaaaaagaaggaatagatacacttttagaaatggtattattggttgctgaaatggaagagttaagagctaatccaaataaaagagcagtaggaactgttatagaagctgagcttgataaaggaagagggccagttgcaacagtacttgttcaaggtggtactttaacagtaggtgacccaatcgttgcaggtgttgcatgtggtaaagttagagcaatgataaatgcaaaaggtaagagagtaaaaacagcaggaccatctacagcagttgagatattaggtctatcagaagttccacaaggaggagaccaatttgtcgaagttccaactgataagattgctagaagtgtagcagcaagaagacaacaaatagttagagatgaaatgttaaaatcaactcaaagattatcactagatgctctatttagtcaaatgagtgaaggttctataaaagaccttaatatagttataaaagcagatgtacaaggttcagtacaggcagttaaacaatctttagaaaaattatcaaatgaagaagttcaagttaaagtaatacatggtggtgttggagctgtaacagaatcagacatattacttgcagcagcttctaacgcaataataataggattcaatgtaagaccagttccaggtgcagaatctctaggagaaaaagaaaatgttgatataagaacatatactataatatacaaggcaatagaagatatacaagcggctatgactggtatgttagaccctgaatatgttgatgaagaaacaggaaaagctgaaataagagaaatatataaaatatctggtgttggaacagtagctggatgttatgtgactaatggtaagatatttagaaattgtaaagtaagattagttagagatagcataataatacatgaaggtgagcttgcagcacttaagagatttaaagatgatgtaaaagaagttaattctggatacgaatgtggtatgagttttgtaaattataacgacataaaagaaggcgatatagtagaagcttatataactaaagaagtagaaagaaaattataaattcgtatcaaagaaaatcagttagtaaagaaggtcgatggtatggcatcatataatagaacaagaaggatagcagaagaaataagaaaagtcgtaagtactatgcttataaatggagtaaaagaccctagaataacatctatggtgagtgtaactgatgtagaagttacaaatgacctaagatatgcttatgtatatgtaagtattctaggtggagatgaagaatccacactaacaggtcttaaaagtgctggaggatatataagaagagaagtaggaaaaaatataaaacttagatatattcctgagatagtatttaaacttgatgattcaatagaaaaaggaatgtatatggataaccttataaaaagagttaatgaaaaaaatgctcaacaaaatgaggatgaaaattatgatgaataatatggatagtattataaactatatttatgagggtgactattttatagttacctctcatatcagtccagatggagacaatgttggttctacactttcaatgtattatacattgaagaatttaggaaaaaatgtatattatgtacttgatgatgaagctccattaaatttaaggtttttggttgaaggtgtaaaaatctataagtctaatgaatttaatatgaagaactattctttaattgcacttgattgtggggataagatgagaatatgtgtgagtgatgaaatcaaaaataatgcatcaaaattaatctgtattgaccatcatgctagtaatgattcatatggagatttaaattatgtagatattgatgcatcttctacatgtgaactagtttataatttattggttagatttcagcaaacaaaagatattaatattataaatgaagatatagcaacatgtttatatacaggtcttgtaactgatactggaaacttttcgtattcaaatgtacatgcaagtagttttgaaatggcaaaaaatttacttgttttaggtgcacaaaaaaatactataatacaaaatatatatcaaagcaattcttctgattattataaattattaggagaagctctaaaaggtttggagatatttgattcaaaggtatctagtatagttttaactcaagacatgatgaatagaaataatattagctttaatgatgttgatggaataacaacatatacaagagatataaaaggtatagaagttggaattttatttaaagagaaaaaacaaaatgaaattaaagtgagttttaggtcaaaaaattatgttgatgtaagtgaaatagccaagttatttggcggtggtggtcatgtaagggctgctggatgtactattagagatagtattgataatgcaaagaaaatggtactagaggcagtgttaaaatcaatttaaggtgacagtaaaatgaataagattataagtatattgaaacccacaggtatgacatctcatgatgttgtaagtagagtgagaaagattttaaatataaaaaaagttggtcatacaggtactcttgacccagatgcttcaggtgttttaccaatctgtatagggaaagctacaaaagtatgtgaagttattttaaacaaagataaatcgtatatatgtgagcttactttaggtataagtacagatacttatgatgcttcaggtgaaattttaaaaaaagttgatgattttaaatttagtaatgaagacatagaaagagcttttgatacacaaagaggagagataaatcaacttcctccaatttattcagctttaaaggtaaatggaaagagaatgtgtgatttagtaagaagtggtagacaatctgaaattactttaaaaacaagaagagtaaatataaaagacataaaaatactaagtataaaaggtaataaagtaatgttttatgttgagtgttctaaagggacttatgtgagaagtatttgccatgatataggagaatatctgggttgtggagctcatatgtcgtttttgaatagaacatcttctggtaaatttgacttagataattcaataacattagaagaattagaattattttatgaaaataaaactttagacaaatacttatatgatatagattatgtccttgattcgtttaattatgttgtattaaaccctaatgctataaaatattatagtaatggtggctcaatagatgataaaaggtttttaaaaaataatttcgataaagatgatgaagttgtaagagtatacagtacagataatttcttaggattaggaaagttatcaaaacacaataatacaataagtgttaaaagtgataagatgttcatataaccaatgtatttaaaaaaacaacaaaagagatagtactataataacttctatagtctatctcttttacttatgctataatagtttgtgaataagttaagagtaaattatattttagcggggaacatttattatggtgattataaaatctataaaagaaatagcaaacataaaagaaagtgtcattaccataggaaattttgatggtgtacacaaaggacatcaagttcttataggaaaaacagttgaatatgcaaaaaaagaaaatatacagagtattgtatttacatttgcaaatcatcctgtaaattactttagaccaaactcaacaaaaaatattataagcaatgatgataaaataaaattattagaagatttgggaatagatatagttgtaatcataccatttgatgagtatatgactaaaatacctgcaaaggatttcgtagatgagatactagtaaaaaaattaaaagctaaaaagatagtaattggacatgactttacatttgcaagggcaaaagaaggcaatgttaatctattaaaaagcttagaacatgaatttggttttgaggtagaagtaataaaacccatcaaaatcaatgatgtaagagtgagtagtacttatattagaagtttagtatcccagggtgatatggctaatgtcaaggaatatttgggtagaaattacaagttagaaggttgtgttatacattctaaacaccttggaagaactataggattcccaacggcaaatattgaccttaagaataatatgctcgttccaaagagaggtatttatgcttctattgtacatattggagatgagacttattttggtgctacaaatgtaggctataacccaacagttaatggaaaaactttgtctattgaaacaaatattttagagtttgatagagatatttatggggaaaatataattgttgaatttttggaaagaataagagatgaaagaaagtttaattcaatagatgacttaaaaaatcaattgtataatgatacaaattatgtgtatgaaaactatgtttgcaaaaacaagtaatgtatgataaaatgattaaggaaaataaccattactcggcatttgaatactccaatcaatgcttagtaataggcgtttctaaaaaaatacggaggtaatctaaatgataaacaaatcagaaataataaaagaatatggaagagctgaaggggatactggttctccagaagtacaaatagctttattaacagctagaataaacgagttaaatggacatttaaaaactcataagaaagaccaccattcaagaagaggactattaaaaatggttggtagaagaagaaacttattagcttacttaaaggaaaaagatcttgaaggatatagagcattaatagctaaattaggattaagaaagtaatttcattctttataaaaaagcaggtatagtgtatacctgcttttttatagttaattcattataaagtaaaatagttaataataaaagtagtttatatgttataaaaaattataaaatgaataatattgggtaagaatattaaaatagtatacaaatacataatcaatttaaaaggaaagacaggataaatatagaaattttataacaggataattagttggaataaggaggatattattttgaaaataaagttagtatgcgatagtttgtgcgatattccagatgaaatatcagaaaaagattatatagagatagttccacttacagttatttttaatgatagggaatatatagaaggagtagatataaagaaagaagagttttataaaaaagtaaaagaaatcaagcaaatacctaaaacttcacaagctacatatatggagtttaaagaagtgtttgataagttcataacagaaggttatcatataatctgtatgacaggggctgcaaacgcatcaggaacttttcaaagtgctatgatagctaaaaatgatgtaaatgaaaatgaaaaaatacatatatttgatactagaaatttatctctaggtagtggacaatatgttataaaggcatgtgaacttcttgaagaaggactgggatttgaagaaattatagatgaattagaaaatactcgcagtagtgtaagattactttttgcaccatatacacttgattttttaaagcagagtggaagagttccagttgcaactgctttgataggaaatatgttaaatataaagcctatatttttctttgataatggggaagctaagttggtaaataaggttagaggaataaagaatatagcaagtaaactggtcgatataattttagaaatgaatgaagggtctttagaaggaaaaatcgtcacaataggttgtggagataatttacacgattgtgaaatattaaaagatgaagtaaataaaagaataaaagcaagaagagtattatttactcgaggaggagtttctatttgctctcatacagggccagatatattggctataagttgttctaattagtagtaatataaggtttttgcatatatatgtgaagataattttatattgttaatttatagtatttttgataatatagtaaatagagtgatatacgtgttttttaataagaggaggacaagcattaatgtttgaacataaaatatttaaaatggattttgcaggaagagaactttctgtagaaataggaaagatttgtgaaatggctagtggtagttgtatagttcgatacagtgacagtatggtaatggtaaatacaactaaatcagccaaacctagagacggaatagacttttttcctttaagtgtggattatgaagaaaaattatactctgtaggtaagatacctggaggttttttaaagagagaagggaagccttcagaaaaagctatacttacatcaagattgatagatagaccaataagacctttattcccaaaaggatttagaaatgatgttcaggtagttgcaacagttctatcagtagaccaagattgtacaccagatatagtagcaatgataggttcttcaatagccctttctatatcagacataccatttaatggaccaacaggttcagtatgtgttggccttgtagatggtgcatttgttgtaaatccaaacgcagagcaaagagaaaaaagttcaatgcatctagttgtttcaggtacaaaggaagcaataatgatggttgaagccggagctgatgaagttccagatgaggtaatgcttgatgctattttatttgctcaccaagaaataaaaaaaatagttgagtttatagaaggtatagttgcagaagttggaaaagaaaaaatgcctgttgaattataccatgcaggagaagaaataactcaattggttcgcgaatttgcaactgataagatgaaaaaagcagttcagacttttgaaaagttagagagaatggaaaatatggatagagttaaagaagaaactttagctcactttgaagaaactttagaagattttgaagattttgttggagatatagaagaagtattacaagatataataaaagaagaagtaagaaaacttatagtacatgaaaatgtaagaccagataatagaaaacttgaagaaataagacctatatggtgtgaaactggcatgatacctagagctcatggttcagccatatttactagaggacaaactcaagtacttaatgttgctactttaggtgctttaggagatgttcaaaaattagatgggttagatgaagaagaaaacaagagatatatgcatcattataatttccccgcatatagtgttggagaagctagaccatcaagaggaccaggaagaagagaaataggacatggtgctttagcagaaagagctttattaccagtaataccatctcaagaagaatttccttatgctattagattagtttctgaagtattaagttcaaatggttctacatctcaagcaagtgtatgtggctcaacattatctttacttgatgcaggtgtacctataaaagatatggttgcaggtatagcaatgggacttataaagcatgatggtaaggttgcagtgctttcagatatacaaggtatggaagaccatttaggcgatatggactttaaagtagctggaacagagtatggtataacagcaatacaaatggatataaaaattgatggtatagataaagaaattctacaacgtgctttaaaacaagctaaagagggtagaatccatatactaggagagatgagaaaaactatatctcagccaaaaccagaactttcaccatatgcacctaagattgttaaaatgcaaataaatcctgacaagataaaagatgtaatagggcctggtggaaagataataactaagataatagacgaaactggagttaagatagatattgaacaaactggggaagtatttatatcaggtattgagattgatatgattaagaaagctcaagaacttataaataatatagtagttgaaccagaagtaggaaaaacttataaaggtaaggtaagtagaataatgaactttggagcatttgttgaaatacttccaggaaaagaaggattacttcatatatctcatatagctcatgaaagagttgccaaagttgaagatgtattgaatataggggatgaagttgaagttaaagttacagagattgatgaaaaaggaagagttaatttatcaagaaaagttcttttaccaaaaccagaacataaaaataaataacttattatataattaaaagcaaagtcttaggattttgcttttttaaatacaaaaaagtagataattttaaaatgatagttatggatggcttatagttctttttctgtaaggctttactcttataaagaagctatttaaaagctgattaatagaaagctttattgatatatatagaatcacttaagttatatttagtgcataaacagagcttatttttaatagtattaaataagaaacaatttgtacataattagggggagttttaatgataatgatggtacttaataagagtaagctcaaaaaaatcataatactaattttagtagtgttattagtattatcaggaggggtaatggtattaaagttatttaacaacaagccagtatttaatttatttaatggtgtagatttaccatatgaaagaggtacaaaggataaaagtggatatgttgcattaacctgtaatatagaccttggatgggaaacagagtacgtagaatccattttagaaacacttaaaaaagaaaatgtaaagattacatttaatgtaactggaaaatgggcagaaaagaataaggatgaattattaaagataaaaaaacaaggacatgaaataggtaatcatggatataaacatttagattattctacattatcatatgaagacaattatgagcaaatagagacctctaaaaagataattgaagaaattataggtgaaaaaactaaattttttcaagcaccagcaggttcctttggtccagaaacagtaaaggctgctaaagcattagggtatacttctatcaaatgggatgccgatactatagattggaaatacaaagaccaaccagaggtaatcattgatagaatgaagaaaaaagacattaaagatagtagtataatcttaatgcatccaaccaacgcaacgacaaaatgtatagatgatattatagctattgtaagagaaaaaggactaaaaccagggaaacttagtgatgtatttaagtagacaaagtataaatatttggttaagattgtataagttgtagttgaattaattaaaagactgacttataatgtaatacatataaaaaataaatataattaaaacatagtgttttcaataatccaatatgaaacaaagaataaattgttaggagaatgtaatgtataagacaaaaatactggaaaatgggcttacaataattggtgaagaaataccatatctaaagtcaataacattaggtatttggataaatgcaggctctaggatagaagaagcacaggtgagtggaacttctcattttatagagcatatgatgtttaaaggaaccaaaaacagaacatcaaaagagattgctagttcaatagataatttgggtggtcaaataaatgcatttacaagtaaagaatgtacatgttattatgtaaaactaatagatgagcatatagatacgggaattgatgtattgagtgatatgatactaaattctaaatttgataaaaatgatatagataaggaaagacttataatattggaagaacttaagatgtatgaagactctccagatgacttatcttatgatttattagtggaaaatatatatgctaatgatggattaggaatgaatataattgggacaaaagaatctctatacaatataactagagaatccatgttagaatacttaaataagtattatattccaaataacgctgttatttctatagctggaaactttaactttgatgatatggtggagaaaatcaaatcaaaatttggacactgggaaaagaaaaatttgagtatagacataagtgaggctaagtttaatccttgctttatatcaaaaaataaagatactgaacaggtgaacttagctatctgcctaaaaggtattccttttgaaaatgatgaagaagtctactcaatggcagtggtaaataatattttcggtggaagtataagctcaaggctttttcagaaaataagggaagaaaaaggtttagtatattcaatatactcatcacagacattatataggaaatgtggtgaattaggcatatttgcaagtatgagtacagaaaatttacaagatgtatataatttaataaagaaagaaattgaaaatataagagaaaactatcttacagaaaaagaaatatctgaaagcaaggaacagttaaaaggaaattatatattggatttagaaagtactagcagtagaatgatgtctactggtaaatctatgttacttagcaaaaaagtaaaaactacagatgaaatacttgaatgtataaataatgttaatattaattcaataaagaaggttgttgataaggtattcaatatcgaaaatattggtacatgtatagttggaagagatgtagaaaagattctacacttggattaatattgaaaaaagtaaatctctggaggtataaaatatgaatttatctgaaatagcaggtaaggaaatagttaacttggtcacaggagaaagattgggggtcattggagaatgtgaccttatactagatgaaactacaggcggtatattagcgcttctaattccaaaggaaaaaggattttttgccagaagaaaagataagtcatttttagaagtaccatggagaaatgtaaaaaaaataggtaatgacatgataattatagaatatgagggatatatttaggaggaaaaaatgagtattttagtgcaaaagtttggtgggacatcagtagaatcatatgaaaaaatgaatgaagtatgtaagatagtaaaagcatacaaaaaaaatgatgaagaattacaattagtattagtagtttcagcaatgggaagaaaaggagctccatatgctacagatacacttataaatttgtgtagtgcagtaaatgatgagccaagtaaaagagaacttgatttaataatgtcttgtggagaaataatatcaggaacaattcttgctaatttattgaatgcacaggggatagattctgttttctttactggtcagcaagcaggtataattacaagtgatgaatattctaatgcaaagataaagtatataaatcctaaaaaggtaaaaagagctttagatgatggtaaggttgtagttatagctggattccagggtgtaacagatgatggagaaataactactcttggaagaggaggaagcgatacatcagcagttgctattggtaaagctttagaatgtgaaacagttgaaatttacactgatgtggatggtataatgactgcagaccctagagtagaaccaaacgctaaagtattgagttttatagattatgaggaagtattccaaatggctgacaaaggtgcaaaagtaatacatccaagagcagtacagttggctaaaagtggaaatataactttagccataaagaatacaatgaatccaacttttgaaggtacaaaaataggttctttatgtagacacttagaagagaatatagaatatgaacaagaaagagattttaaggttgctgttgcaaataaagatagtgtagcacaagttaagattaaatcagcagaagaagtgtttacagaagtattaaatgagatagaaaagaaacttataactatagatatgataaatttctttatatcagaaaaagcatttgttgtagaagatgctgatataaaatcattaaaggaaatactagataaatttgaattagattatgaagtaaatagagactgtgctaaggtaacattgatatgttcaagaattgctgatgaaatgtctggtatcatgtcaaaggtagttagaggattatcaaaagcaggggtatctcttttacaaacatcagactcaaatatgactatatcttgtttagttagtgaagaagatatgcatacagcagtacatgctatacaccaacaattttatttaaaataaactgtataatacaattattttttaatcaaatttaagaatttcatatatatcttaatatatttgatttatttggtaaaactaaattaaatataattttgataggagtttttttatgaaagattatagagaagataatgaaagatttgataaagataattgtagtgaagaatctagttgcgaagagagagaatgtataaagcaatttggtaccaatgaaatgccacctcaacctcctaaagatattcaatgtataactataattggagaaattgagggacattttataggaaatcctcaaaaaaaagctacaaagtacgagcatataattccaatgctatactcaattgaggaaagcaatgatgttaaaggagtgttagttgttttaaacactgttggaggagatattgaagcaggtttagctattgcagaacttttaaacagtacatctaaaaaagtagttactcttgttctaggaggaagtcatagtataggtgttcctcttgctacagcaggagattactcatttatagcaccaacagcaaccatgattatacatccagtgcgaactactggtcttgtgattggtataaatgagacttttgaatattttaaaaagatgcaagatagaataattcaatttataataagaacatcaaatatcaaaaaagatgtacttgaaaaacttatgcatgaaaaagatgaacttgtaagtgatgttggtagtgtattaataggaaaagaagctgtggattatggtcttatagatgaagttggaggactaaaagaagcacttaaaaaattaagagagcttataaaagaatctgaggaagaaaaaaataatgattaaaatttgtttaaataataaaatttatgatataatgatgtaataaagtaggagtgttagtgttaaggcattagcactttttgctgtgaaggggtaaaacttgctaaaaataaggagtgatattaatggccacgaaaaagaagaaaaaaaagaaggtaaataccttaagttttaatgcagaatatcataatttaataacaatatttataggtgtatttttattatatagtttaaattctaattctatgggatggatacctgtgttaatgcaaaatctttttaagggactatttggagggctttcaatagcaataccatttatagtaattataacaggacttttaggattttttgatggaaatgaatatatatataggctaagaaagactaaactatactacataattattttatttatatttgtattttatggattattaaatgcaggaactcttcctgtagatagcccactaaaaggtaacatgtttgatgatgttatgaaattgggtgtaagtggacaaggtagtggtttgatagcaacaactattgcgtattatatgagtaaaatatttggtatagcaggtggatggttaataagtatcttcgcacttatactttctgtaatgtttatatttaatatttctataaaagatttggtgtcaaatgcaaaatcaaaatctaaagcatctaaagacagcaatttaacgtttaaagataaaattgcaaatatgaaaaaatctgcaatagatatgatgactgatgaagtagatgatactactataaataaaaaaccaggtttctttaaagggttaatgtcaaaaggtcttaataatgatgatgaagaagatgaatattttgaagaagaaaatagtgatggtgtagatgataaaactataaaaatagttggatttaataaggcagaagatgagtatttagaaatattagaaggaactcaaagtatgccagagttagatgttttaaaagaattacaaaaagctaccaatgaaaatccagttgtagatactaaaccagaaaaaaaagttgatatagctaaatctaatttaaatatagaaaaaactcaacctatgagtattgtagcagagccagttaatgaggattattcaaactataaaaagcctagcattgagcttttaaataaagtaaataagaagtctgatgaaaatggtaaaaagaaagtgttgaaaaatgcttctcttttagaaaagacactatcagattttggagtggaagcaaaaattaatcaagttacagttggacctactataacaagatatgaaatacaaccaagtccaggagtcaaggtaagtaaaattgtaaatttaactgatgatatagctttaagtttagcagctaaaagtataagaattgaagccccaattcctggtaaaagtgcaattggaatagaagttccaaatgaagaagctcaaatggttggtgtgagagaagttctagaaagtgaagaatttaataattttaactctcctcttgcaatgggacttggaaaagacgtagcaggaaaaattataattggagatataggtaagatgccacacttactaatagctggttctacaggttcaggaaagagtgtgtgtgtaaatacattaataagtagtattttatataaggcaaatcctgatgaagtaaaattactattaatagacccaaaagtagttgaacttgcaaattataatggaataccacatctattgataccagtagttactgaccctaaaaaagctgcaaatgctttaaattgggcagttacagagatgaatagaaggtataaattatttgcagatgctcaagtaaaagatgtaacaagttataatgagaaagcggaagaaaaacttcctaaaatagtaataataatagatgagttagcagatttaatgatggcaagtgcaaatgatgtagaagattatatttgtagattagctcaaatggcaagagctgctggaatgcacttgattgtagcaactcaaagaccatctgttgacgttataacaggggtaataaaggctaatataccatctagaatagcatttgcagtatcatctcaaactgattcaagaacaatccttgatatgggtggtgcagagaagcttctaggtaaaggtgatatgttattctatccacttggtgcagcaaaaccagttagacttcaaggggcattcatatcagagagtgagtcggaaaaagtaattgattttgtaaaaagtcaggttaaagatggaataaaatatgaagaagatataattgaaactatatctaaggttaatacttcaaagagtagtgatgaggatgagtttttgagtgaagcgatagaatttgtcgtggaaagtggtcaagcatctgcctctatgctacagagaagatttaaaataggattcaatagagcagctagacttatagattctatggaagaaagaggcataattggagcaagtgagggaagtaaacctagaaaggtattaataagcaaacaggatttgcagaatttagaaggtgaatagaattgtcagttataaaaatagaaaaagcacttaagctagataaagtaatatttgtagatgtgagaactgaaggagaatatgaagaagaccatatattgaatgcaatcaatatgcctctttttaaaaataatgaacataatgaagttggaacaatttataagatgcagggaaaacatgaagcaatacaaaaagggtttgactatgtatcgtataaattaaaggatatatatttacaagcagcagaacttgcattaaattatgataatattgtcatatattgtgcaagaggcggaatgagaagtggaagtatagtaaatttattatcatcattaggtgtaaatgtatatcaacttgaaggtggatataaggcttatagaaattttgtattagagtatctaaggcatgtaatggatacaaaaaactttgtatctgttcatggattgactggtacaggaaagactgatttgttacatttattagatgaaaaaggaatagatgtactggatttagaaggcatagctaaaaacagtggttctacctttggttttataacttttgataaaaagccaccatctcaaaagaactttgaaacaaaactatttgaaagtgtatttttttcgaaagagaattatatatttgtcgagagtgaaagcaaacgagttggaagtgttacagttccaaatgaaattttcgaggcaatgacacgagaaggacatcatatattattagaatgtgatattgaaaatagagttgatagactttgtagagattatatttatgataaagatgaaggtaatatattgattttaaaagaatgtataaacaagtttagaaaaagattgggtaataaagtagtagatgattatattgatttattagaatcaggtgaatataaagaacttgtaaaaagatatcttttagaatactacgacccactttatatgcattcagtagagaaatataagtatagtaagattataaattttaatgatacacaaaaagctttagaagatgttatagacttatatgagagtatattggaaggagaaagtgaatgttaaaaatagcattggaatcattaggatgctcaaaaaatttagtagatgcagaaataatgatgggaattttaaataacaaaggctataaattaattggagattttgaagaagctgatgtaattatagtaaatacatgtgggtttatagagtcagctaaacaagaatctatagatacgataataaacttttcagagttaaaaaaaactggcaatttaaagttgttgatagtaacagggtgtctagcccaaagatattctgaagaattaaaaactgaaattcctgaaatagatgctatagtaggaacaggaagctatcaaaatatagataaaatacttaaagaattaagtgaaatgcatcaaattgtaagccttaatgatatagagtttgtatttaatgaagatttaccaagatatatatctacacctagctatatggcctatttaaaaattggagaaggatgctccaataattgtacttattgtataataccaaaactaagaggtaaatatagaagtagaaaatttgaagatataattaaagaagctaagaaattagctgaatctggagtaaaagaacttgtggttatagcacaagatacgacaaagtatggttttgatttatatggaaaagaaagattatcagaacttttagaagaacttgcaaaaatagatggatttaagtggataagggttatgtattcatatccagaatctataacagaggaattgatacaagttataaagaaatatgataatatatgtagttactttgatatgccaatacagcatgcaagtaacaatattttaaaattaatgaatagaaaaactactaaagaagatatattaaataaaatcaatctgataagaagtaatataccagatgctatacttagaactacgataatagtagggtttcctggtgaaacagaagatgacttcaaacaacttgtggactttgttgaagaggttaaatttgatagacttggtgcatttgcatattcaagagaagaagatacaccagcagatagattgccaaaccatatagatgaagaagtaaaaatacaaagaagagatactttaatgatgattcaacaaaaaatatctgaagaacttaatgacaaaaagataggaaaaacttatgaggtgttaatagaagaacagatagaagataatgtatatacaggaagaacacaaggtgatgcggaagaaattgacagtatagtgtatgtaaaaagtgtagacaatcttgaagtaggagaatttgtaagtgttcaaataaatgatgcaatggaatacgatttaatgggagatgttttatatgaacttgcctaacaagttaactttgtttagaatatttttaataccagtatttgttttaattatgttgctcaatgtaccaaataaatttttaatagcttgtattatttttataatagcttcaattactgatgctttagatggaaaaatagctagaaaatacaatctagtcactgactttggaaaatttatggacccattagcagataagttattggttatttcagcacttacatgtatgatagaagaccatcttgtaagtagttggatggtaattataatagtggctagagagcttacagttagcatattaagagctatagctgctgctgatggaaaagtaattgctgctggaaacagtggaaaacttaaaacgataactcaaatggtatctatagtgtttttattgttaggcgctcagtttgaaaatgtattgatattaaatattggtgaaattctcattcttatagctacactacttacattatattctggatgggaatatctatataaaaataaagagctttttatgtcttctaagtaaaaaattatgctttaataaataaaaactaatgattaataaataaaaaataacaacttaaaattttaaaaatgtaaaaaagggtatactattatagtatacctcttttcattttaagaatattttcttttgtgtatataattattaataatggtttataaataaaatgtaatgaataaaaatataatcattagtagcgtttttaaattgactaggtttgatttatgttatataattaatatataacaagagaacaaatgtttgtagataaatgaagggatggtatagagatgagtgtagatcaagaaaaattaaaagcgttgaatgaagctttaggtaaaattgaaaaagattttggtaaaggttcagtaatgaaattgggagaagcaacatctatgtctatagatgttatatcaacaggagcgattggtttagacatagctattggtataggaggtctacctagagggagaatagttgaagtatatggtccagaatcttctggtaagactactgttgcgcttagttgtgtagcatcagctcaaaaagatggaggaatagctgcatttatagatgcagaacatgcacttgacccagtatatgcaaaagctttgggtgtggatgttgataacctaataatatctcaaccagatacaggtgaacaggctttagagatagcagaggcattgataagaagtggagcgatagatataatagtaatagactcagtagcagcattagttccaaaggctgaaatagatggagatatgggtgattctcatgtaggtttacaagctagacttatgtcacaagcacttagaaagttaactggttcaattaaaaaatcaaattgtgttgctatatttataaaccagttaagagagaaagtaggaataatgtttggaaacccagaaactactactggaggacgtgcactaaaattctattcatcagttagattggatgttagaaaaatagatacaataaaacaaggtgataaagttataggtagtagaactagagttaaagttgttaaaaacaaagtagcaccaccatttaagcaagctgaatttgatataatgtatggagaagggatttcaaaaattggagaccttttagatatagctgctgatgtagatatagttaaaaaatcaggttcatggtatagttacaatgatactaaacttggacaaggaagagaaaatgttaaaaaattcttggaagataatttagatttaactactgaaatagatgagaaagttagagcattttacaatttaaatgaagaacatgaagaatcaggtacttcagtatcaaaagaaattgtagaagaataagtaaaaatacaaaaaaataactagtaattaaagacatgccacgctccctattagcttgacacaatgttgaaaaaattataaaattaagtgaggataaaatatctaaatttaattttaattattaggaatattttttaatcatagtgatgacattttgggattattaacgaaggaggtggatgtcatagatagtgtagtaatgattgtaataggtgcagctgttggtattatagctggatattttgttagaaaaaatatatctgaagcaaaaattggacaagctgaaaacttggccaaagaaataatagataaagcacaccacgactcagaaacagtacaaaaagaaaaattactagaagctaaagaagagatccataagtggagaacagaagctgaaagagaaaacagagaaagaagaacagaagtacaaaagtatgaaaaaagagtagtacaaaaagaagaagtcttagatagaaaattacaaaatttagaatctaaagaagtaaacctaagtgaaaaattaaaggtagtggaaaagaaagaagaagaagtcgaagtaataaaaactcaacagttagaaaaattagaaagtatatcaggaattacttctgataaggccaaagaaatcatcttaaccaatgcggagagagatgtaagacgtgaaatgtctataatgataaaagagatagaaagtcaagctaaagaagaagctgataagaaatcaagagaaattataggatatgcaattcaaaaatgtgcagcagatcacgtagccgaaactactgtaacagtagtaagcttgcctaatgatgaaatgaaaggtagaataataggtagggaaggtagaaatataaggactttagaaaccttaacaggtatagaccttataatagatgacactccagaagccgtaattttatcaggatttgatccaataagaagagaaattgcaagaattgctctagaaaaattaatagcagatggaagaatacatccagctagaattgaagaaatggttgaaaaggcgagaaaagaagttgacaatattataaaagaatatggtgaacaagctgcatttgaaactagtgtacatgggattcatccggaattaataagattattaggtagacttaactatagaactagttatggacaaaatgtacttaaacattctatagaagttgctcatatagctggtataatggctgctgaaataggagcagatattagattggctaagagggcaggtttattacatgatataggtaaggctgtagaccatgaaatggaaggtacacatgttgaaataggtatggatttacttagacgttataaagagtctaaagaagttatacatgccatgagtactcatcatggagattacgaacctcaaacagtagaggctgtattagttacagcagcagatgcaatatcagctgctagacctggtgcgagaagagaaactttagaagcatatataaagagacttgaaaaattagaagaaatagctaattcatatgaaggtgtagaaaaatcatttgctatacaagctggtagagaaataagaataatggtaaaaccagaagctataaatgatgaagaaatacatctattggctagagatatgactaagaaaatagaggatgaacttgaatatcctggacaaataaaagtaagcataataagagaaacaagagctatagagtatgcgaagtaaaagaaataatatctaaataataagaaaatatttttagaaatttaaatttgccacaagatatgataatatatcttgtggcttttaaattgtttaagtttaattttatataatgcaaaaataatctaagtgctaaaagtgctacttacaaaagattaataaaataaagctttatatatgtattatttatataattatccaagtttgtttgatataatgaagttgtaaaatcaatactttactacaaaataaatagtaaatactacagtaaaatctaaaaataggatataatagtattaatataagaagattataaataaaacctgctaatgaaaatagattatttttagcaggtttttaaattttttataataaatcttatttttagtcaacaagatttattttttttaaaactttacttactattttaaacattaattatgaaatttatcattttattatttacagaaagtattctataacaataaatatctatatttattgcaaaattattttagcagttttgtatttatttgtatttattttgaatttatttactaaatttgcctataaaaagtatatataaaaatatagttcaaaatggtataattaagtataacagaaggaggtaatgtaagtgagccaatacataaatataaattctcagttagacgccctaaaattgaaggagttcgagaaaatattttacgaaaatatcaatgaggacgttaaagtagtgccaaaagttactccttttaaaggaataaataccgatttgttgtatgttaaagatggaagaattttatttataaaatttatggatacaacagaagatatattttttattttagaagaagagttacttgaagttatgaatgaggaatatgaacttttgaaactaaaaatgggacaaaagaatagaaatataagttataactacgtttacattatgccatacgttgaagttgaggaaacatatgaatttgaagaatttgttaataataatataatagataaaaataagcttcaagatataatgaataagggttcgctggaggagtatcttaatgatgagaatgatgaaataaacttaaatttatttttactagacatatgttcagaatactatataataaatgataaacttcatctaaatgaaaaatttaaaaaaatttcattctacaatgatgactataagtatacagcaactatgatggaagacgttcaaattaaagatgttgtttctattaaatatgggaatacacttattgaaggtggttctggtataggcaaaacagcaattatgctttctagggctataaaattagcaaaagtatatccacatcataaattagtcatatttacacatacaaaacaattgtgcaatgagcttcgagagaggatagagttattatacaaagataataacaatttagaagttcacacatttagttcttttatatttaaactagctaaaaaattcaatttaattgtagattataacatgttaaaaaatgattacgaaaagacctttaataatcttgtaaaacaagcacagaacattataaaaaataaaaatatgttcaaggctatttttattgatgaagcagaaagctttttagagtatgaaatagattttataagggagtttttatataaaacaaaattcatatttaatgtgtgttcttgtaactccttgaatatctctaatagattgaatatatttaaaaaattatataatggtatagaatttgatgataagattatcttaagtaaaaattatagacaagctaaagagattgtagattttacaaataaattttcaaataattctaactcatatatcaacgaattaagaccaaatacagaatttagtactttcttttatactaaagcacttagaggtggaaataagtctgttgatataataaaagtaagtgaccttgatgaccaaataagttctgtaatctgggaaattgagtatttaataagtaaaaaaggtcttgattattctgaagttgctatcgtttatccttataataagaagaaattaaaaagtggaaaaaccatttactttcaatatatgttaaaaaaagcattggaagaggcaaaaattccttatatatgtgcagaagataatttgacaaatataagtaagaaggtaggaactacaatagcaaatatatatgcaataaagaatttagagtataaagcggtaatagtatgtgaattagagatgttatacaatcaaactataaatgatattgaacaagattatcaagtaaatgactttgtaggagatttaaataaggtttatttagctatgagtagagcaacagactacctaagtatagtaacaacttttaatgaagaagcaagtgatataataagacttattacagaatcaaaagatatttagtaaaaaaatatttgtaatttaagaaaataaaaagagactgagatttgtaaaataaactttaccaattcagtctcttattttttagtccactttcccaatattatcaagaggtaatagtctcaccataaccttaccaagaatttcatcttcatcaaccatacctacatcagggaatctactatcattactattttctctattatctcccattgcaaatagtttaccttttggaacaacagtatctatatctccagaagtatagttattgtgtatatatggttcatttaataattttccatttacatacactttagaatttgatatttttattctgtcaccttcagtagctataactctttttattaagtcttttttctttcctgtttctccatcaactaaattggttttaaaaactacaatatcgcctttttcaggtttaccaaccttgtatgatatcctatttaaaatcagataatctttatcatctaaagtaggatacattgattctccacttacaacagaaggtcttataaattgtagaattacaaatgcaagtacaatagccatagctattgacttaatccaatcaaatatttcttttttaacactcataacttttctccttatcatttgttattaaattagaatacattataatagaaagaaataagcaagaaccactatacccaagactattctataataaccaaatactttgaagtcatgttttttgatatagtccataaaaaatttaataactacaattgaaacaacaaatgctactacagaaccaacacctaaaataagccattcaaatccagtaaatccaaatccagcttttagaagttttaatgcactagctccaagcattgtaggaatggctaagaagaatgaaaactctgctgctacatatctagaagtaccaagtaatactgcacctattatagtagaaccagacctagatgtacctggtatgagagctagacactggaataatcctatacaaagagctaatttatatgtaacttgagaaaaatctttatacttaggtcttttatttctcttttcaagccctatcattattataccatagacaataagagcaatagcaactactgttgaattaaagaatactctgtctatgtcatcttcaaacagtattccaataactccagatggtataactgcaattataaccttaagccataaacgaactgtttcttttttctgtttaatattctttgcactatcaaaaggatttaactttctaaaaaatataacaagtacagctagtattgaaccaaattgaattacaactaaaaatgtatttataaatgtatttgaaaaattcaattttataaactcattaattaatatcatatgccctgtactacttactggtagccattctgttattccctgaactatgcccaaaatgactgccttaaaaatttcaagcaaactaaatgtttccaaatcaaaatacctccaatacaaatttatagtagcatattttattcatagattaataaaaaaatgccaccttttactaacttataataccatagtactgtgtagtgcacaatggaagattgatattttcataaaaccttcataatataacaaaataaacttaaaagttatctattgaataaggggtatatttgagggggaaatatatggtatagtaaaagtatagctattttattttatgaaaaggaaaggagttattatgtatagtacaaaaatactagatgattatgagtatgaaacttttaatgttttttctacaaaattaaatccaaacacgaaacacgattatttatcaaaggttatactgtttaaagaatttttaaaagggaaagaattgatttatgctacaaaagaagattgtaaaaattttgtagactatatacagactaaatatgcgaaatcaacttgtgaaaagatatatagttatttacatagtttttataacttcttaaaaaaagaaggatacatagatataaatccatttagatatgtagaaaaacccacagtaacaagaataaaaacaaaagatgatgttctaagtatacaagaaataaataaacttataggtatcctaccaaaattaaatataagagatagagtaataatagtctgtctagttactactgggtgtttattaaatgaattagttagcttaaagtggaaagaccttatggtagatgaaaacgataactcatatgtaaggttaggtaagggaagaaaagaaagagtagttaaattacatccatacttttttaaacttttagaagattacaggaattattctgggcttccagaggtaataatacctagtgatgattttatttttacaactcaaaagagtaattctataacagatagaaatgtcagacttatagtcaaaaaagcattagatttagctggactttctcaatattcagcaagagattttagacattcatttgcagcaataagtttaaggcttggggcagatgaaagtgatgtaaaaaatcagcttggatggagtgataaatactatgcaattagatataagtatgtattaaattttgttgatagtgaaatagtggattacttaattgaaaaagataatttggatataaataaaaaatagtaataaataaaaaatactatatatagatgtgaacaaaaaataaaaaagtcttgttatagttcgtaaaattatatataattatttatgtactaatgtgtacacagtaatcacacgacaaaagatttaaggaaggtgctaatataatgatagataataaatatactacttactcaaacccacttacagacagatattgtagcaaggacatgagttatatattttctccacaatttaaattctctacatggagaaggttatgggttgcacttgcagaaggtgaacatgagttaggaatcaatataactgaagaacaattagatgagctaagagctaatatagataatataaattttgatgaagctagaaaaatagaaaaagaagtaagacatgatgtaatgtctcacgtaaaagcttatggtttacaatgtgaaaaagccaaaggaataatacatttaggagcaacatctgcatatgttggagataatacagatgttatacaaatgaatgaagctttaaaacttctaagagtaaagcttgtaaatttaataaacaatttaaaagaatttgcacttaagtacaaagatatgccagctcttggatttacacacttccaagctgctcaacttacaacagtaggaaaaagagcttgtttatgggctcaagatttaattcttgatttggaagatttaaactatagaatagataacatgaagttaagaggagttaaaggtactactggtactcaagcaagttttttaagcttatttgaaggagaccacgaaaaagtaaaagagttagataagaaaatttgtaaaaagatgggataccattcttcctatgcagtaagtggacagacatatactagaaagttagattatcaagtaataagcatactatcagggatagctcaaagtatgcataagatgactaacgatataagacttttacaaagtttaaaagaattagaagagccatttgaaaaaaatcaaataggttcatcagcaatggcttataagagaaacccaatgagaagtgagagaatagcatctttatctaagtatataatctctgaatctataagccctgcaatggtacaagccactcaatggttagagagaacattagatgactcagccaataagagattggcaatacctcaagcatttatggcagcagatgctatacttgaaatagggataaatgtaactgatggtttagtagtatatgaaaatatgataaataaacgtgtaaatgaagaacttccttttatggctacagaaacaatacttatggaagctgtaaaaagaggtggagatagacaggaattacatgaaataataagagaatattctatgaaagctgcctatagagtaaagcacgaaggtaaggataataacttaattgaacttataatgaatgatgattcatttaaaatgagcaaggaagaaatactatctataatggacccaaaaaactttataggtagagctccagaacaagttgtagaatttgtaaatgaagttgtagaacctgctataaaagattataaggaagacttaggaaaagtagatgtggacctaagagtatagaattgtacagataaaatataattaaaaacggctatcttatttataaataagatagccattttaatgggctagcgtcttctcttcagcgctgtgaagagttcttctttacttactataccatgaatttaataaaatagctatataaataatatttaatagaaataatataaataaaaataaaaaaatgataagattactaattaaatttaaacattcagcaaaaactattgtacttgcaatatttttaatgtaaactgaaataaagttatttagataatttaataaattttaaaacaaccgaggtgattatatgaactatatagtaaaagataccataagttttttagtaaaaacatttcctaagatttattctagtctgtacttagaagacctaaaaaaatttgcaccagattataatgtaaataaaacacaattaagagcattagttttcataaaaaattatggagtaataagtatgactgatttatgctctaagttaaatatagaaaaaggcagtttaactagtatggttgatgatttaactgataagaagtatgtaacaaggaaaagagatttagttgatagaagaaaatatctaattgacattactgaagagggagataagatagcaactgattttatggataaattaagtgatggtttaggagaaaaactttctaaattaactgaagaagacagaaaaaaatatttagaagcaataaatactcttcaatatatattaaacaaagaagaatttagatagaaaaaatataaaaaatttttatatttaatagtactaagattaattctttgttattcatttaactatataattataagtctaaatacaatctaaaaagtacatcttaaattttcttgatgtacttttttataatttcttatacattttcttatttgttagtacctactcatacctctttgtgtaatttatatttttccattttatattcaataattttattttctaatctctttttaaatttctatatatcacaatgttactatgtctttgtttgaaaaaatttacagttttgaaaaaattactatttatgtaaaaatattttaaaacaaattataaagtttcaaaaacaaaataaaaatatataattatgacatagaaaacgttttaaaaatttaaaaatggagggatagaaatgaaacaaaaaatgaaagagttttttttacagttaggaaaatcatttttattgccaatagcattaatatctgctgcaggtatatttttaggaataagttcagcattttcaaatcctaatatagttagtgatataccttttttagaaaataattttattcaaggaatattgggttttacaaaagctataacaggagtactttttggaaacttagcaatattctttgctatatcaatatctgttggtcttgctaaagaagaaaaagcagtttctgcattttctggttttgttggttatttagtattacacactagtgtaaattatatgttagggtgtagaggtattcttgctgaacctgacatgatgagagaaatgggtcaagctgtaactttaggcatacaaacattagagttaggagtatttggtggaattgtagttggtataataacagcatcattacataataaatactataatataaaactgccagattatttagggttctttggtggaactaggtttgttccaataataacaacagtagtattctctattttggggataataataccatatatatggccatatgtaaatacaattattcagagtgtaggtattggtatagctagtttaggatatttaggaacctttgtatttggatttcttgaaaggcttttaataccatttggattacatcatatattaaatgctatgtttagatttactgaagtaggaggttctttagttgtaggaggacaagaagtatttggagcattgaacatatttttagctcaactaagtgaccctgaaacaatcagtttttcaacagaagcaactagatttttagctcaagggaaaatacctataatggtatttggtcttcctgctgcagcatatgccatgtataaaactgcaaagcctgaaaataggtcgaaggttaaaggtatattactagctggtgctttagcaacatttgtaacaggaattacggaaccattggaattttcattcttatttgtatcaccaatattatttgttatacatgcatttttatcaggtatatcatttatgatgatgcatatatttggagtagcaataggaaatactcaaggtggcataatagatttagtagtatttggagttatgcaaccaaatacaaagtggatttattctataatacttggtttagtgtatgcactggtttattataatgtatttaaggttttgatacttagatttaacttacaaactccaggacgagaagaaataacagatataaattttgatttagaacctttatcaaataaagtagaaatagctcaaagtggagaaactactaagagagcattatccataattaaatatttaggtggtaaggagaatatagaagatataacaaactgtataactcgcttaagagtagtagttaaagatatgagtaaagtagatgaaaatgcttttaaaaaatatacaggtgcaatgggcgttataaaagtatctgataaagatatccaaataatttatgggccatctgtatctcaagtaagagacgaagtttcttttgcaatgtctatttaatgtctatctaatgtaaatattaaaaggcaatactaatttataatttgtattgtcttttttgtagtataataaacataagataaatgttgtatagtgtatatttatataataaatatgagaaagttgtttaactacaaatcattattatggaggtataaatgaacctaatagacaaattagatataaatcaaaaaaaattatctacaaatgaaatatctcttttaaactattttctaaaaaattctgaaaaaataaatcaaaaaaagattaaagatatagcaaatgaaacttttaattcgactgcatacatagtaaggttttgtcagaagctcggcttttctggatatagtgaatttaaaaactttttagttttttcatattcaaatagaaatgaaagaaataaggagtttactaaaagtcaaagtgatatttttactgatgttatggatacacaaaatttaataaatgtagagaatatagatatgtgtttaaatgaaatacataattctaagcatatatatttttttggtgttgggtcttctagattagtatgtactgaaatgtctcaacgtttttcagctataggtgtaaatgtaaaatactatgatgattcaactctcatgtatttggctgcatcaaatattactaaagatgaccttgtaattgctgtatctatgtctggagagactgctcaagttattaaggcatgtaatatagcaaaaacaaatcaagttaaagtaatttctctgacaaatataagtgtcaattcattatcaaatatagctgatataaaattatttgtatcttctccacaatataattttaatagtgttaactatacgtctagagtgccagcactttctcttatggaatatatgtttcataaatacattgaaaaatacaatagatgaaaaaaattacaattttgaaaaaaatactaaaattgaactatttttaatgattacctaaaagtattcatgtagaaaactttatatattataatcatcttacaagttagttaataaaaaacaggggtgattaatatgacaatgaaaaaaagatacaatatagctatagttggaggaggcagtacttggactccaggacttttaaagtctttatgtaaaatgagtgatagatttcctctaaataaagtaactatgttagatgtagtagaagaacgtcaaagattaataggggaatttggaaaaatattatttaaagaagaatatcctaaagcaacacttgaatatactacaaacccagatgaagcatttatagatgtagattttgtatttgttcaaatgagaactggtggtcttaagatgcgagaattagatgaaaagattcctctacaatttggactggttggtcaagaaacttgtggagctggtggatttgcttatgggttaaggtctataggtgatatgatagaaatggttaagactgtaagaaaatactctcctaaagcatggatattaaattatacaaatcctgctgctattgttgcagaagcattaaaaagagtatttccagatgataaaagattacttaatatgtgtgaccaaccagttaacttgttaaggtcttatggaagattgttagacatggattcaagaacatttgagcctgtatactttggattaaatcactttggatggtttacacatttgtatgataaaaatggtgaagatttggtacctaagataaaagatttagtagcaaactctggattccaacctgttgatgcagaacaaagagataaatcttggttagacacttatggaatggttaaagatatgttggaagatgtaccagattacttacctaatacatatgtacagtattatctatatcctgataaaaaagtagctaaatcaaatataaattgtactagagcaagagaagttatgaatggaagagaaaagcgtgtatttgaagaatgtaaatctgttatagaaaaaggaacatctataggttctaatttagtgcataatgatgctcatggggaatttatagttgaagttgcagaagcaatagctcataacaaacaccaaatagccatagttataacagaaaataatggggctattaacaacttacctgatgatgcaatggtagaagtagctgcgattcttacaaagaatggaccgagacctttacatgtaggtaatataccaacattttataagggactgttagaaggtcaactagcttatgaaaagttagcagttgatgcatactttgaacaatcttatgaaaaagctattttatctttaacattaaatagaactataatctctccaactaaggcaagacaagttttagatgctttaattaaagtgaataaagattactggccaacactatataaagaaaatgaaaaatagtcaggtctaagtcttaattaatatattaattaagaaatgtccccttttcaaataatatctgaaaaggggacattttatatcattaaatttatataaattaagtttaaaaaattatttttgtaaagctacatattgctctaaaccttcttttaataatgtagcagctctatgaaggtctttttcatttaagatgtaagctaatcttatttcatcacgtcctaaacctggagtagcatagaatccttcagcagggcaaaccataactgtttcattatctttgttaaattcttttaacatccaaattgtgaaatcttctgcattttcaactggtaatttagcaactatatagaaagcaccagttggttttttacatataacaccttcaaccttcattaattcattgtataatacatctcttctttttttgtactcttcattaacttctttgaagtaagaaacaggagttttgtataactcaacagctcctatttgctctaatgtaggaacacaaagtcttccttgacataatttaagtatttgagcgataagacctttatttttgcaagcgatagaaccaattctagcaccacaagcactgtatctcttagaaacactgtctattattataactctatcctgtacaccctctaagttaccacagcttgtatactcaagcccatcataaacaaattctctataaacttcgtctgctattatccataaatctttttctttagctatttcagctaggatattaagttcttcttttgtataaattgcaccagttggatttcctgggttagaaagaattatagccttagttttatcatctactttagacaatatttcttctttagatggaaggtggaaaccgttttctgcctttgttgtaacagcattaacttctacatttacagattgaccaaatccattgtagtttgtatagaatggttctggaactaatagattatctcctgggtcacaaactgccatcatagtgaaaagtaaagcttcactaccaccattagttactaataattcatctttttcaaaattcatatcgtaagttttatagtaattttgaagtgcttctaataattctggaataccttctgatgtagcatattctaagacttcgctatcaaagtttttaacagcatcaaaaaatcctttaggagtttttatgtctggttgtcctatgtttaagtgatatactttgattcctttatcttttgctgcttgtgcaaatggaacaagttttctgattggagaggcttgcattgcactaactctgtttgaataattcattttaataccccctatttaatttaaatacgtatattgtattatgtaaattgtatgtttgaatacaagacatctttacaagataataataacatacttatgggtaaaaatcatcaaaaaaaattaatatagctttaaaataaacttttaacaaattatagtaaaatacccatgtttatgccactaaattatgtattcataaattaatttatagtaagataatattctgatacactgatagtgattttttagttataatctttcagctatagacaaaatatataataataaatatgcaaaattataaaaaatattataaatttatttaacagatacgataaatatcatataattatattaaaggctattaactaagaggtgttaattatgaaagaattaagaatagatccaattactaatgatgttgttatatttgctacagataggttaaaaagacctttagatacagcagatatcccaaatgaagatgaagaaactaatgaatatgatgaagaatgcccattttgcaaaggaaatgaagctcatgcaactgatgcattatttgaaatagaaagtgaagaaggatggcttgtaaaatctgtctacaataaatttcctataattgatgatatggcaagagatgtatatggtgttcatgaagtaatgatagagagcgataaacataatcgtagtttttataacatgagtcaaaaagaatttgaagatgttttttttatgtatagaaatagatttagagatttgtcgaaagatgataaagtagagtatgttagtatcttcaaaaacttcttgagaaaggcaggagcatctttgatgcatccacatgctcaaatattgtctatgtcttttattccacctgaaattacgaatgaactgttagtttcaaaggagtattatgacagcaataaaagctctttgtatgatgatttaatagaaaatgaaataagtttagatagaagagttgtttataatggagaagcttttttggtacttataccatatgcaaccaagtatagtggagaagtaagaataatatttaaagataaaatagagtttggtgagttaaatgataataatatacaggagctttctacaatatttgaaaagttgtttaagaagttatacaatatcaatggatatatgccatttaacttatgtattcacactcatccaacaaagattgaaacaaaatcgtattttaatgttcatatgcacataatcccaagaaaatataattttggaggatttgaacttggaacaaatatgtatgtttcttcaatgagccctgaagatttaacaaaaaagttaaaaattgattaaaacatatatttttaggtattaagtaaatagtaattatagatgaaattatagtatagtattgttaaaataaaagtaaattaagaatttacaataaaattgttgaaaagcccccatctttagctatggggagtgtgtcaatgtttagatgaggagtataagtatgaaatttatatcatggaatgttaatggaataagagcttgtgttgggaaaggatttttagactttttcaaagaagtagatgcagatatattttgtttacaagaaactaaattgcaagaagggcaaatagagttagatttaccaggatattttcaatattggaattatgctgagagaaagggttattcaggtactgctatatttacaaaaaaagagcctttaaaagtaatgtatggaataaatatagaagaacatgacaaagagggtagagtgataactctagagtttgaagatttttactttgttacagtatatacgccaaattctcaatctgaattaaagagactagaatatagaactagatgggaagacgactttatagattatttaaccaaactagataatcataagcctgtaattgtgtgtggagatatgaacgttgcacataaagaaatagatttaaaaaatcctaaaaataatatgaaaaatgcaggttttactaaagaagaaagagagaagttttctaaattattagacagtgggtttatagacacatatagatattttaatcctgataaagaaggcgtttatagttggtggtcatatagatttaatgcaagaaaaaataatgcagggtggagaatagattatttttgtgcatccaaaaaattagaagatagattagtaagtgcggatatacacactgaaatattaggttcagaccattgtccagttgaattagagataaaataaaaattaattacgataaaaattgggctgtagatataaatttaaagttaactagttttttaatctacatgcctattttttatctaaataaactctatttgttttttctttgcttaacattttctaatgtaaattgatttgttttccccatattataagctaagttaatgatttttttctcgtctttagttaattcacgatttaaaattttcctaaattcatcaaataacttatcataatcaactctttttttattagaatatcttatagttttaggttttatactcgtataaagatatatatctgggactatacttggattgtatatcttaataaaaactttagcagtataatatgcatcatttaaagcattgtgataagacattttttcatcaagttccaatatagaaatagcattttgtaggccaatgctttttcctgctggattattgaaatatttagatgcatgttgttgtatattaatataagatttaggtaaggaacttgatggtagcttgtgatagttgatattcctgtataattcctttaaatctccaactccccaaacacataatatagggtcttgtgatgatataaattttataaaattgttgtagacctcagggaaagtaggcgaatcattaaaatcagaatttttaatattagtcatacgactaataaagggatgtatgtctttataaattgtaggttttacatagctattaaacgtatctattatattgaatttagaatccaatttaattgctcctatttgtataatttcaaaaggacacttttcattggatacagttttattgagttttttatcaaatccttggttaaattccaaatcgaaaattatgtattccataaagtttatctcctaaatttttttattatttcttttactatagattatattataaataaaattaaattttcaaataaaaatacttttattttagtataccccatatttgtaaaaatgttaaactattgtatgtataatattttttccaataaaaaatattgcgaactttttatacttgatatataataatataaataaaaacacgaataaaacacgaataatttgcaagaaaaattcatgaatgtaaggaaaatgaaatttatcttgtatttaacaaaataaaatatacataaaaattatgggagagtggaaaaatggatagtctattatacgtaatagagaaagataaacacactaatgaagaattaagagaaatcctaaaaagcaataaaaatataagatttgtttccttaatgggggttgatttaggaggaaatgcaacagatgaaaagattcctgtagaattatttttggaggatatagataaatttttggaatcagctatacagactgatggttcaagtgttgagctttataatatagctacattaaataatgcgaaagtagatttaatgccagataaaagttgtcattggtatgtagattacaatatggaatatatagacgaagaagtaggtctacctgttggaacattaaagatacctgcatttttaatacatgataataaaaaagtatgttctagaggagtacttcaaaaagcagataagtactttaaaaagtcaatgtatgaaatatttagagaatatccacatgtaataaataacataggaatagattcagtagatgatatagaggaaataatgttaacagcagctacagaacttgagttctgggttaatactcctgaggataaagctgacttagagaaattatatgtatcacaaagcctaaaagagcaatactggaaaagaactcatggtattataagaacttgtttagagaaaagtttaattatacttcaaaagctaggtgtaaaccctgaaatggctcacaaagaggtcggaggaatacaaagttctattagtatagatggaagaacaaaccatgctatggagcaattagaggtttcttggaagttttctacaccattacaagcagcagacaatgaattattagtaagagatgttatagaggatgtatttacatcacatggactagaagttacatttaaagcaaagccaattcatggagtagcaggaagtggtggacatacacatgtaggagtaagtgcgaagttaaaggatggaagtataaaaaatctatttgctccaaaagatttaaaagaagattatctaagtgaactaggatatggggctcttatgggacttctttacaattatgaagtattaaacccaattgtaacagcttctaatgatggatttaatagattagttcctggatttgaagctcctgtatgcatagttacatctttagggcatagttatgagattccatcaagaaataggtcagtgcttgttggattaataagagatatgaaaaatccaaagactgtaagatttgagttaaggtcaccaagccctctatctaacacgtatttagtaatagcaggatgttatcaaacaatgttggatggtataaaagcagcagctaagagtggtcttagtacaaaagaacttgaaaaagagttatctaaaaatgtaggtgaagaaagtttctatttagaaaaagatagagcatatagagatgaaaatgatgtatttgaacattatagtttggaagaaagaaatgcaagatttggaataccaccggctacagtttatgaaaatatgaaaaacttagaaatatatgcttcaaaattaaaatctttaaaacaaggtgatgtatttactgatagtataatagaatcatttaagattggagctatagataagtggcaaaaaaaattaaaaactagaataatagaggctgggattcaaaaaataagaagtattgtcaagatacacacaaaagaaaatatggatgcgcttgatgaggtagtttggaactcaatatcggatttaaagttcaatattatgaaggatactttaactagagaatcactattcactagagtgagagaagctatagaaaataaggattaccagactgcttcagatttacaaatagaattaaagagaagtatggaagaaatacaacaactgtatatgcagtacaagaaaaatatatactaatataacaatttgattttgatatgataaaggcaatcaagtattattaaacactatgagtaaattctcaagtgtaaaagcatacttgattgcctttaattttatgtttgaaattttttaatagtacaatttaactgtaatgattatctattaattctgatatataatcagcaattttctctggatgaataactgttttaaattcttctaaattttttttcataaagtttattatagaatcaaattcatttgatactaatttataaaatatgtttttaaggtctaggtcatcactataaatcatgccaagacccttatctattataaatttagcgttttcaatttcttgtccaacttttggcattttcacgagtactggagtttgtgattgaatagcttcaaatatagttgctcctccaggcttagttagcattaggtcacattctcttattagattatacatgtcgtttacaaatccaagtactttaatattttttagaggttttttatgagttagattgtcatataattttttgtttttaccagtaactattgtaatttctatagaattactatgttcttcaataaattcatctatccaatgcataaaatcctcatctatatcaaataggcctcttcctccacctagaagtaatagtctatatttatcacaacatagttctttactttcaatttgaaatctcttatcaacaggaactccagtaacctttatggagtctggatttattcctttctgaaaaaatctattttttatttcaggagaaggaacaaaatacaaatctgtattttcaaaaacccattccatactatctacaacatctgttataactgtaagtgtaggtatatttatatcaggattttttatcttaaagttatttacacaagcagccgctagtggaaatgtagagataatcaaatctggatttatatcagcaatatactcagaaagtttaggtgtatataatttatgagataaatcatgtcttgaatcaaacgatttcttaaagtaataatagtaattatataatccaggagtatattttgtattgttttcataaagttttaccataggtttattcatcatgggaatacttgcatttataaagttttgtataacaacattatagttactatatttttcaataatacattctttgactgcttttgcagcacttatatgtccagcaccaaattgagcagttaagattaatattgttttatcatctttcattttagccaatttatcaccactttcataaaatatatctgattagagtattatacatttatagaaggatttaatcaacaagaatatttaaaaataactattgtgcagaacatagtactgtgttattatgaggatataagaagttttaacatagtaccttgtaaaacacaatactgtgtatttaaagaaaggatggagtatatgaacacacaatttagaaagggtgttttagaaatttgtgtacttgctctcatatctaagaaagatatgtatggatatgagatagtacataacatctctaaagtaatagatgtaaatgaaggaacaatatatcctattctaagaagacttacaaaagatttgtatttcgaaacatatatactagaatctaatgaaggtcctgctagaaaatactatagaataacttcactaggaaaagagaatttatccaatctgatggaagagtggagagaatttgtaaaggctgttgagattttaataagtgaagatgagggaggtaatgaacttgaataaaactgagtttcttgaaattttaaaggattatctaaaaaaagatttttctgagagcgaagttaatgatatattgagagattatgaagagtatttcgtagatggtcttatagagggaaagagtgatatggagataatagcatcacttggttcaccaaaatctatagccaaagaacttatcttgcagactaaagaaaaaaatattgaagaggaaaaaataataaatacagatgttttgaatgataagtttagtaaatttaaatcagatatgaaaaaaggttactctatcttaaaagatgaagcaaaagaaaagtatagtaaatcaaaagaaaatatagatggaaaaataatgaatacagatatattaaatggtaaatttagtaggtttaaatcaaatataaaaaaggattactctatcttgaaagatgaagctaaggaaaagtacaataaatcaaaagaaaatataaatgataaacttacaccaagtatagaagaaggtgtagggggattatctagacaagttataaagggattattagtagtgttatctttatttctaattgttccagcatttgcgtttgtatgtgctattgtatctgttactattgcattagtatgttcattaattgcttttgttatattaattccatttgtgattaaatttatagcaatggttccagatgttatgatgttttgtattttcgcaaccatagcatttgtagggcttgagatacttgcatggcaaattttattatttgctataaaactaggtaaacaattactaaataattatatacattggataaagagaaaaaatatttatataaaggcaaatgaaaagatggaaaaaagaaaaaaagctactttaaatgatgaagatttgaataaagacattaatgaagattcatataataatgattactacaatagagaagaagaaagcataaaagaaactgatgaatataatgatgatagtataaattttgaggcgatatataaggaccttgaagatatagaaaataagaaaggagaagataaacatgaataaaaaacttgctatatttgctgcagttttattggtaataggtataatagggacaacatggtcagggattttagttatgccaagcctaataaactttggtttagaaaaggaagctgaatttaaaaaagaaaataaactttatcaagaaaaagtaaatattgacaagttagatatatctgttgacaatataaacgttacaataaagaaaagttcaagtgaagatgtgcgtgtaacaacaagaggaaataatgagttttacaaatacaatgtaactttaaaagataagactttagttgtaaaaggtgaaagaaaatatgaaaataaaattaaaaagattaaaaatttcgaccaattattaaatacatctataaatagtatgttttcacatgattatagagaaattataatatatgtaccaaataatgtagacataaatgcatcaagtacaagttcatacttatttgtatatgataatgtagcttcaaatactataacatataaaacttcttatggaggttttagtagagctataacagagaacaaagtaaatagattagaaaacctaaacttaatatctaatagcaatcttcacttgtcaacaaaatcaattttaggcgttaaaaatgtaaacatagaatcagagtcattggatatatcttcagagaatgaagatgtatttatcaataatatagaagagtatatacctgaaaatgtaaatataaaagagaaaataggtagaaattcaaattatgaaagtgaattttacttgtactctaatatgccaattgctaagttcctggacatagaagttccaaattctaaggtaagacttgatataccagtaaataagtataaatttaattgtgatataaagtcaaaagaagcaattgaagaatttaataatgatgaagaatatgacaatgattcatatgattatgaacatagtgaagaacatagcaacaagtatagaaatacgagggaaataaaagggcttttgaataaaaatctgtcgaatttagagaaagaatatactataaaaataaattcaaatagcttagaattgtaaataatttactataataatttataaattgatttaaaagtataaaaatataatctatactatggtataataagtatcgaaagagaattaggagagggatacttatgaataaaatagcagtaagttttttaataattgctactactttattgagtacagcatgtatggattatagcatcagtgcagttgagctagttgattctaaagaatcagcagttgtaaagaaggatgaagatgcaaaagaagaaacaactagtaaaatgattaattctaaaaaaactactaaaatacctatagagataatttcaaaggatgagaaaatagtaaagtacttacagattgatgaagaaagttcacttaaggataaactgcgattaatcttagatacattatcaaatgagtattttaatggtttagacatggaagtagaagttaaggaaaaagataatcttgttaaaataaacttgatagaaccagataaaaaaagtagagtttcttggaaagatgattatttgaatgaacaaaatataatatatactataaataatattattaaaaatgtcatccaagaagaagataatagcatttggattgaagaagtagagatatactacaatggaaaattaatagaattaagataaaaaaagatgtgtttttaacacatcttttttttgttttttaattcttataaaatccttatatttatgatttagaatgattcttgtaaataagtttgacaaaagaaaggatgaaaattatgaataattatattttgcaggtaaaaggagtttctaaaaaatttaaggagcagatggcagttgataatatttcactagcaattaaatctaattctatatatggattattaggaccaaatggagctgggaaatctactttattaaaaatgataactgggattttaaatccaacttcaggaaaaataatgtttgagggacatagatggactagaaaggatttatcaaatattggttctcttattgagtctcctgctatatatgagaatttaacagcacgagaaaatttaaaagtccatactactttacttggtcttcctgactctcgaattgaagaagttttagagactgtcgacttaagagatacttttaaaaagcgttcaggtcaattctctctaggtatgaagcaacgtcttggtattgctattgcattattaaatcacccaaaacttttaatcttagacgagcctacaaatggtcttgaccctattggtattgaagaacttagaaaattgattcgttcttttccaaaacaaggaattacagttattttatcaagccatatcttgtctgaagttgaacaagtcgtagatgaaatcggaataatttctaatggagtaattggttatcaaggagaagtatcaaaagaacaaaacttagaaaaactttttatgaaagttgtagctgaaaatagaaagagaggggagtaatatggaaagatttattagagtggaatttcaaaagatgaaaggaacttttggaatgaagttgatatggatagttccagtgttttgtatacttttgtgtggactaggtggagggcaaaatgctgctttcaactggtggtatacgacatttcttccaggagcattaacattaatatcttctttaatagtattaaaagatgaaaaaagtaaatatcgtggtattttaccattgccaattgaaatgaaagacgtttgggctggaaaaatgatttactgtattatttgttgttctatagcatcgattatttctgcaataggtgtagtttttgttgggataatctataaagaaactatttcaataggtcaaaatatcattgcaactatattaattattttactatttatgtggcagattcctctttgtatgtttttagcttcaaaatttggtatatttgttacagttctaacaaatatgttctttactattgttggagttgctgttttctcaactacagaaatgtggtatgtatttccatattcgattccttcaagattaatggttgttgtattgcatattctaccaaatgggcttcctgtaccagaggggagtgaacttttaaataatgctgttattttaccaggagtattaatatctgttattttatttgtattatttgctttagttacaagagcttggttcaataatagagaggtgaagtaatatgagacaactaataagaatattttgttctgatttaataaaattaaagagaaattttataatactaatgcacatttgcattgctttaatggggatgggattgtttttatggtattataaggtttcaggagctgataatatattaaagatagtagcatatttacaagttatagcaatagcttttcctttattgtcaggtgttgtgtgttcaatgtttgttgaacaagaatattatgcagggaattataaacatatgttaacaacatctaatccaaaatatcttactcttataagtaaatatataatcttagtatgtcttggttttgtagcaacattagtgtctgtattaggttttaaatttggtatatctaaggcttactttacatcaagcttttatatgatttcaattctaattttaattgggtgtaatttatttgaatacatattacatttattcttaagtttaaggttcggaaaaggaacatcaattggagtaggtatagttgaaatgttactttcagcattattattaactggattgggttctggcatttggcagtattttccttgtgcatggggtgttagatttataactatttggtcgtctttttcaagttctaaaacggttgaatatataaaggttgaatcaataaaagcatatcaatcaacaggtttaatgtgtggttttgtaacaattttagcatttgtaattttatgtatttggttttctaaatgggaaggtaaaaagtcagaagaataaataaaaattgactgtttatttacattatatttatattattatgttaaaatataacttagcaatgaaaaatataaaataatcaaataaaaactggttaggtattaattatgaattaattaaaatatttggaggatatggcacaaatgcttagaagtaaaaaatctaacaacaaaaaagttgaaaagttaagaactatttttataaaatatttatctttattctttgttatgacaatttcatttgcacttcttttaatgttatcattttctgtattattatcatcaggtgtaatattaccagctaattattcagaaaaacaatttgataaatataaagaaaagattatttcaagtgaaaaagcaattgaagatataattccaaatttatacgagtatggtgtttatactttagatgggaatttgatctcaggcacttttaataaaaaagaatcaaaacaagtatggaatttaatgagagatattgaagaaaggcatgcatattcagaaagttatataaagttttttaagaaagatgaagtttttataataaaatacaaactagtatcagagtatagttctccagttttaagagcatatttaccaaaaccagagatgttaggtatgattatttttagtataatattttttattgaaattgttatattatcaaaagtatttggcaagaaatttaatattgaaatggagcttttaaaaaatactacagaaaaaatagaacaacaggatttagattttgttgtagaatctagtaaaatttatgaaattaacaatatccttttttctatggataaaatgaagttggcgttaaagaattctttagaaaaacaatggatgctagaagaaaatagaaaggaacagatatctgcactggcacatgatataaaaacaccattaacaattatacatggaaatactgacttattaattgaaataaatgaaaatcctgagttattagaatacatggaatatatctcaaagggtgtcactcaaatagaaaaatatattaatactttaatagatatatcaaaaacagagaatggctatatattaaataaagaagcaattaatatgagtgagtttataaaagatgtcttactgcaaatagaagcattagctagtactaaaaacttagatgtggagttttataaacaagataatttgcctaaaaatataactatagatagagaactgttattcagagctattatgaatataatttcaaatgctatagattattcaccaagccagagtaaactatacataagtgtatcagtaagtaataaatacttaaaatttgtagttacagattgtggaagtggtttttctaaagcagatttgtcaaaagctacagaacagttttatacaggagatttgagtagaaattctaaatctcattacggaatgggactttatattgtaaataatattgtacaaaaacataatggaattttatatattgaaaattctgtgaaaactggtggtgctatggtaacaattgaaataccaatagtttagtaaataatatccattttgtaaatacctaaattttatgatttataggtatttataaaatggatagtttttttgattttatatattagttaaatctgataaaaagttttcaaacataactccatcatttctatcagtatcaaattgagatgtgtaatttatagttttatatataaaatctgttgcagtattaaccgctactcccaaatcatgtttatttactaacataccacaaagtatagatgtgaatatatctccagttccactgtaagaacaattattgtatttgactgatgtaaagaatacatggtcattatctctatcataagccaaatttaatatattatcatcttctaatataccagtaataacgactttgctaggtcccaaatcagatacagattttgcaatatatataagctcatctctattataatcgcttttagtataatcatttccagttaagaaacaagcttctgttaaattaggagtagttaaatctgaatgtttaactaattctttaatttcctgtctcatttcttctgtgaatattggatacataactccattatcacccatcacagggtcaactacgataaaagcattgggataatcatttataaaattagccactatctcaatttgatgctttgaacccaaaaaaccactatatatactatcaaaattgacttttaaatttttccaaacatttgaatattttaccatttcatcagtaaagtctaagaaagtaaattcaggataaccagtttgacttgaaagtatggccgttggaaatggacaacattgaacctttaatgctgaaagtataggtatagcaaccgataatgagcattttcctattccagataagtcattaattgctgcgacttttttttgcataaaaaaccctccattagtatgtattaattataatgataccaaaatatttatatacatatatattactataaaaaaaagaaaaaagtagattataaaataaaaaattgtaaaaaaaacagtgtattgatacaattaatttttaatattggacataataaaatagagaattattaaatatgaaaattattgtatatgacagaatcttctttgtaatttcatttataaggtgtactatttgggaggtgtagctttgaaaatactgaaaaataagaataagtacatcaaaggtataatggcatttgtatttttgtctttagctactacagcaggtgtatttttaatcaatgatttaagtatgaaaaatatggaagaaaaagtcatggaatctgcaaatgttgaaggtgatgatgtaaaagaccaatataaactattgcttgaaaacttatttgactacagaaataaggcaatattagagaaaaatgaaaacattttaaaaggtctttatgagacggataaaaaatttggtctgtgggcttatgaaaatgaagtaaaaaagatgaagtatttagaaaactggtctagtaagcaaggtgtaaaatttaaagacataaagacaagggttaagattaaaaaaataaaagaaaaagaaaaagacctctatggtataatctgttcagtatcgactgaatataagtattcatatgaaaatcaaaaggacaaagaaaatgcctttagaataggtacatatcattatctaaatgtaaaaattatagataatcaatatgtcataactaaagagtggtacacagacccttttgcagactctttaaatttagaaaatataaaatctgaggatataagaaactatattgggcaacaagatggtgtagagttacagcttacagatgaacaaaaaaaggctatagattatgcacataaatactgtggagccgcagctgatgaagaacatggtatgaaatttaatccaaactatagggattataatccagaaggtggagattgtgcaaactttgcatcacagataatgtttgaaagtggaaggttcaaaaagaactcaatttggaattatagcgagagagcaggtacaaaagcatgggtaaatgcacaagcttttaaaaattatgcactgtatagtggaagaggttcattaattgctaaaggttcctatgaagaagtatacaaagaagcttataatttacgtccgggggattttgttggttatgagaagaaaggcagaataacacatgtttcgacagtgacaggattagactcaagaggatatcctttggtaacttgccataatactgatagaatgttggtgccatgggatttaggctggagtgataagtccataagattccatataataaaaataaattattaaaaaattataaagaaaaataaagtgtaaaagataataatcatttaaaattataaagtaaaaaaattgattattaatgtataaaaataataataattgacaaacatagctatatatgatagagtagtaataaggttacagaaaagagtagctaaatatttgtgtttttttaggaggatttattaatgaaaactggtgtagttaaatggtttaacaacgaaaaaggatttggattcatatctgtagaaggtgaaggagatgttttcgtacatttctcagctataactggagatggatacaaaacattagaagaaggacaaagcgttgagttcgaagtagtagatggagctaaaggtcctcaagctgctaacgtagttagattataattaaaaattcatatatattagtgttctagtaatatgagagataagccgctaatcatttagcggttttttcagtttttgtaaataaaattaatagcaaaataaattaaaattattaaaataaaatcattaataatgagataaatatgttaaaattaatagtgtagagtaaaattattatggctaagtttaagtcaattaatttttagtaaattttctaaaaagagaataagtgatactgatagaccatataaaaatattaataaagcataataagattaaaatgagcaaaggaaaaacgcttgttacagcgtatagtattaagaatacttagaaaataagaaaggagaaagttactgcaaaaaagtaacattataaatattgagtaatatttataagttttcagtaacggtgggtagtgtaatgaacatattattctttctaacaccaaaaagtgaagtagcatatatatatgaagactacactataaggcaagcactagaaaaaatggaatatcacaaatactctgcaattccaataataagtaaggatggtaaatatgttggaactataacagaaggtgattttttatggacattaaaaaacgatttaaatctggacttaaagggattggaagatgttccagtgacagatataaatagaaaaatggataattctcctgtttccatcaacgcagatattgaagatttagttataaaatctttaaatcaaaatttcattcctgttatagatgaccaagacacatttattgggataataaaaagaagagatgtaataggttactgttatgagataatacgtggatataaaaatttagctaatgataattaaaaatcttatttaaacttttaagctgagttctttacaataaaagaatgataatatgaaactgaatatttaaactttaatataaaaagctgtcttttctaataaatattgtgaaaagacagcttttttatatatgaccttatgattaatcgttgtattttacaaggtttccgtacttagcattaagagcatttatcttatttccataaacttcattttgtttttgatataataaacttttttcaacttcagccttaacttcatcaaatgtagactctgtactttcttgaaggtcttctaattttattatatggtatccaaattgagttttaactggttcacttacttcacctttagccatagagaacacagcttcttcaaattcaggaaccatttgtcctctaccgaatgttcctaaatcaccacccatatctttagatgggcaagaagaatgtttaagagctgcatcttcaaaagatatttcttctgattttatttgagcaagtatttctttagctttttcatcactatctactaatatatgtttagcagttgcactttctggtttagagaaagagctcttattagcttcaaagaattttactttttcatcttctgttacattaacactagataaaactttatttatagcaaattgctttaatacattttcttctatctttttcatttctaatttaaatatttcttcttcatctaatttttcttctttagcatctaagaagaataattcttgattcactaaatcatttaataagtgtttttttccttcttcagttttaaattgcatagcttgataagggtctaatgattttaatgcattttcaatatcaatattagttatctctttttctccaactgttgctaaaacttttttttccataatagttaactccttcatagtgtatttcattattaatataagactaccatcttaaataatatcagaaaataatgtagatgtctaatatttaaagccatattaagtcaaatagaattaaatttagtagaacaaagttattacaattaataaaagtgagctcataatacccactacaccttcatcatctttaaatttaagagtttttactattgaataataaaggtatattccagtaaaaataatctttaaatacaagaaaaataaactctttgggtatattaaaaagctaaaaagtgtaaatataaaagcaagtagagtacttatcctgtaaaagaaatctatttgtgtaatgtctttatattttatcataaacaccgaatataaaatgatgaaaataattgcgacgattgcatatatggtaaataacatattttcaagagtaccatttgaaattactatccacttataccacataattggccaaaataatagtgctaagaacttaaaataattatcaaacaacttttctttatacattcatcaaacaacctttcttaacaaaagcatatatttgtttttagaattttaaataatatgatatcattattatatattaatattgaatttatagaaaccaaaatttgttaaaataaatatatagattttactgttaagccagttaaaattactactatttttattatgaaattggatcaaatatgtagaaatacggcaaattagttaatattaaatatttattatttccaagttgtaaagactgtttttttaatgataaaaattctaatcttttttgaaagaaagtaatatccacattaagtatgtctgccatttcataaacgcaagtgatgccagaattaattatgtttattatatcttcttcagtaattaagaactcacaagcccattttaaggctttattttcgcacttatctataataatttttgtataataatcgttataagaggatacatagtatccaaggctagtgaaatgatgtccaagttcttcagctaagatggatgtcaatttttttgagttttgttttaaattactgagtaatgatataattttaataccatgtttgtttatatatagcccttctaaatcacctgcaatataagtggtataatgaattattatctcttcttgagaagctaattcaaaaagcttatccaaattattcataaaaatccccctaaaatagaatgtatgtttgcctttaaattatattaaaagagcagaaaaatagactgctcatcatatggtttatttttttttatatttatttagtaaaaattctatataatcattaagttgttcttgtgcttcttcaggtaactcttcatgtggattttttctatgtgcagctactgtatcaatattttccttaactaaggttcttccaagaaggtaatcaactgatacattaaatacatcagccaatttgtttaaaatgtgttcatcaggaaatctgttttctgtttcatagtaccctaagactctttgggaaacgcctactttttctccaagttctctttgagtcaatccaaattcctttctaagttctcttaatcttttggcaaacattataacaccaccttatgtatagattataacaaattgttctaaaaaataaaactaataaaatataaaagaatatttttttctaaaatctattgataaagaacaaatgattctatataatctaagtgtggaagaacaaaatattcttaatggtaatggaggtataaaacaatgtttaaaaataacttgaaatattatagaaaatgcaaaggtatgacacaaattcaacttgccagaaaggctggaattacaaatgactatatatctcaaatagaaagaggtataaaaaatcctggtcttcttatggctaagaagatttctagtattttagaacaaaatatagaagaagttttttttatacagttatagaacaatatgttcttgaaagttgtgagattagtaaaaaactgtgcactaaagagattattgtaaatttgaagctaataataagtatataaaaaaggagaagtactatggaaaacaaaaaagatatattatttaaagaaacagatgaaagattacataattataagtatttggatataaagataaagaatattaatttggacataaaaagatgtgagaatgaatactctggatgtggagcaatggtatatacagaaaagactagtaacacatataacataagttcttctgtggaaaatgaggtgttaaaaagagaggaaagattaagaaaattaaaaatggaaaaagaagatatagaaatagaaaaagagaagatagaaaatgctctaacatgtctaaatgatatagaaatggaattttttaatcttttttataatagtaagacaaaaaacaatatgacatatatttctatgaaactacacttagatagaacatcttgctacaatttaaagaaaaaaatgatatttaaattgagtgagatattataaaaaatatgacaactttacaacactttatatacactattgcaacactaggcaataaaatatgtgagataatgttattgtgaaagaaatccatattgaaggaggtgataaattgaaaagaataatattacctaaaaatatagaagatatttgacaggaataaatgagatgtatatttaaaaatgacttatatcatttatagtaagattatcagattaagcaagaatatttagtgatagtgtggtgattatttgcttaaatacaaggaaatattagaaacaattattgagattctcaaaaaaaactttactgaaagtatttttattgatgatgaaagtgtgcaaggctctgaagggtcttgtttttttgtaagtatactatcagttatttgtacacctataatgttaaatacgaataataaagatattgttatctctataaaatacttaccaaaaccacagtcaaagagtattagaatgtatgaaatttcagatgaattaaataagttattcaacagaaatataaaggtaacagacagaaaattaaatataacaaagctagaacaaagtattaaaaaagaagagtcaatttatgtattgaactttacaattacactaaattatctggatagtgtatatgaagaagatgtagtatatgaaaatatggaagaaatcaatttaaatttaggagagtgatagtatggctataggattaccaagtatcaacatatcatttaaggagctagctacaactgttaaagaacgttcagctagaggaataattgcaatggtgcttaaagatgctaaggcactaggtcttaatgaaatacatgaaaaagaggatataccagttgatttatctgctgaaaataaagagtatataaatttagctttgatgggaaatgttaacactccaaataaattattagtttatgtaatagaaggagaagcagatattcaaactgcattagattttttagagactaaggaatttaattatctatgtatgccaaaagcagtagaagctgataagactgctataaaaaattggataattaaacttagagatatagataaggttaaggttaaagctgtattaggaaaagttgtaggaaatcatgaagggataattaattttactacagaagatgtgttagttggagaaaagaaatacagtgttgatgagtttacaagtagggtggctggacttatagcaggaacacctttaagtcaatcagtaacttatactaagcttagtgatgtagttgatatacctaagatgacgaaagttgatgcagaatcaagggttaataaaggagagcttatacttattaaggaagcaggggctataagaattgcaagaggagtaaattctttaactgagttaacagaagaaaaaggagaaatgttccagaaaataaaaatagttgacactttagatattatacatagtgacataagaaaggtgataatagatgactatataggaaaggttactaacagttatgacaacaaatgtttattgatagtagctataaaaagttatttagaagaattagaaaagtcagcacttatagaatctgattctactgttgaaatagattttgaagcacaaaaatcgtatttaaaatcaaaaggagtagatttatcttatatgacattacaagaaataaaagaagctaacacaggttctaaagtatttttaaaagcaaaaataaaagtacttgatgctatggaagatatagatttatcaatagaaatataggaggattattaatatggcaaatatggaagctagaaatgtaatgagtggtacttggggagaactttggcttgatggaaacaaagtagcagaagtaaagaagtttcaagcaaagatggaatttacaaaagaggatattataatagcaggtcaaatgggtactgatacaaagtatatgggatataaaggaaaaggttcaataactctataccatgttagttcaagaatgcacaagttaattggagaaaagataaagagaggttctgaacctagatttgttgctatatctaaattaaatgacccagattcttatggagcagaaagaatagcagtaaaaaatatagcatttgatgatttaactttagctgattgggaggttggagtaaaaggagagatagaagcacctttcacatttactgagtatgattttcttgatataatttagttttatatttggttttatactgatatttagtagatatatacttaataaatttaggtagttaataagtaaaaaagttagttgattgaatttgattgataaaggagcaaataataatgaatgaaaatggattatcaaaaaatataaacatagtagatttacttttaaatgcagatacagaaaacttagaaagaccaagtactatagttgaacttaagagattatcaactatatttgggcaggaatttaaagtaatgtgtagagctttaacaataagtaaagatgaagagatacaaaatacttgtcttaaaattgatgaaaatatgaaaacggatatagacttaccggagatgcagatgcttacaattatagaaggtgtttgtgatttggatggaaagcttttatttaaaaataaggaactaatggataaatttaaggctccaacaccaaaagaattggcaagaaaactattattaccaggtgaaattaccaacctatatagaatacttcaagatgttatgggttatggtaaaaatgcagtgatagaagaggtaaaaaactaatagggacggataccaagactacaataatgtactattattggaagaaaaaaggtataagaccgtcccttttttatgcaatggataaaggcgaattaaagcttattgaagcttttttcgccttagaaattgaggaagaagttgaaaaaatgaaacatggatatggagtgtgtcctttgacaggaggtggtatgtaatgggaaatgtgagagaagaaggtataaatatgtatcttacagataattacacaccaaaaatgaaccaaattatatcagtaactgataattttaggagagcaactgtggctgtttcactttccactaatgtaatggctagtagcataaaaaattctattggaagtgcaagtagtagagtaaacagtttaaattcctcgttaagaaaagttcaaactactgctagtagtgtaagttcaactatggcaaaattaagttctagcataaatgctgtttcaggagttattggaagtttaaatggaagtattatgagactagcaataactatagctatgattattgattattttaataagttgattcaaaagaaaaatgagtttaattcaaatattatgattatattaatatttaaagctaaaagtgatgaagtagaaaaaactaaaaataaattacttggaaatttaaaaaagattggtggcaagatttggaatatcgtaataaaagcaaaagatatgactaagagagtgataagtagtatcttgggaaaattaaaacgagtagagaaacgtccttatcaaggaagtattaatcttaaagatatggtaagtagtgctatggctagaattttgcctaagttaatgttgtttaaaaatactttttggagtggtgtaatagctataaaagatatggcaagtagcattataagtaaagtatttcccaaattgagattgtttgcaggtaaggtatggagtggtgcaatagctgtaaaggatatggcaagtggaatacttggttcgataaaagggaagatatctgatttgacaaatggtgctactataggtgtcgctgtgaaaaagggtgttgacttacttggtcaggaacaaaatcagaaagttgttctagaaagtgtaatgaaaagaaatactggaaaaactagccaaaaagatgttgataagtattatgacagtttagtaaatatggcaaatgatacgccttttgaccctgaagatgttgttgcaatgggaactaaagctaaaatgattagtaatattactggtggcaaaaaagaaaaagatataactcaagctatggtagatgttagagctttaaatatgaatacaagtagtgaacaagatgtatcagcagctttcttaagtgcagcaaaaggaaatatggaatctcttaatactctggtaggagaaaattataaaacttttgatgaagcattggaaggcataagtgtaaagcagatggggttagctaaagaaatgagtaatacaataccaggtataatatcaggagctcaaacaagcattaacaatggtttgaagagtattgttaaaccttttgatgatattttaggtcaaggactaaagaaaataaaaacttttatagaaagtggattagggaatttagctggcttatctgaaaaaatggctggtaaaataggcaatgtaatgaatggtaagataattattggcaacaaatatgaccagatgcaatctagaagtgtaaaaaatggaaaagagttttctgattctactcaatatcgaatttctaatgaggctgaaaagcgtaaaatgatggttgaaaataagcaagaacgttttgaaaatcatgcagcaacaatgatagggaatgcaccaaaagcaattgttaacgcaggaagtacactattacaaaatattgattttacagcattaatagattcactacttccagtagtaaacttagtaaataatttactagatagtataaacaataaatcaccaattgcacaaggattaataagtatatttggtacaatagtaactacagcattccaactaatcggacctgtagttgaagctgttagtcctattatcacaagaatttttacttttttaggtgaatatgcacctcaaataaacaattttatagagacactgggtgttatttggaaaactgtatgggagaccttaggacctctgttggaaactggatggaaaattatagagccaatattgggagctttttttaacatattagataaagtatgtaaaatagttaaagatatatgcaaatggtggcaaactatgattaataagataaaaaatggaagcatcacaggaacagttttaaatctagtggaaaagagtaaaaaaaattacaaagataatccatatgctggaacaaaggctggtgattctggtaaagcttattcaagtaagaaaggtaataatgcatttggattgaactatgttccttataatgactatcaaaccagactccatgaaggtgaaatggttttaactaaacaagaagcaaatcaatatagaagcagaaaaaatggtggaaatataaacatagctaagttagctgatacaatagtgattagagaagaagctgatatagaaaagataacatcaaaattagttgcaagtatccaattggcacagttagggggtgtcttataatggaaatgtggcttagacaagcagaagatagatttagatttccagtatttccatcttcctttagtattaatggaaaagctgctgtaaactcttctagtatactcaaaataggtgaagtagcaacttttggtggtgtagctcttaaaagcatttcaatatcaagtttttttccaaataaagactacactttctgtgactatacaggttttccatcaccatatgattgtgtaaataagatagaaaaatggatgaaggaaggttttatattaagatttacaattacggaaacaaatataaatatggaagtcataattgaagggtttagttatgaagaaagagatgggactcgagatgtatattttacattagatttaaaagagtataaaagaataaagataccaaaagtaactccaaaacaataactattatagataataagttgtaagtaactgctgatagaattaaatgaaaaggcaggtgattttttattattaagatttgggtacacataaaaaacggaagtatatatgacataactgacatagtagacaaggtatcatggtcaggtgattataaatctccatcaaggacactagagttttcaataatacaatcatcatttgatgtaaatttccaacaaatcgatataccaatagctagtacagtctgtttctatgtagatgagaaagaactctttagaggaatgataattaataggtctaaagattcaagcagtaatgaaattagttttgtatctaaagatatgggatttttacttacacaaagtgaagtgtcatacaattttaaagataagttagttgaagacatagcaaagcaagtatttgctgaaaataggctttcagttggaacaatagcaaagaccaatgtcaagtatacaaagatgtttataggagtaaatggttatgacacaataatgagtgcatatacagaggcaagtaaaaagacaaagaaaaagtatatgatagaggctaatttagataagtttaatgttattgaaaaaggaactgttacattaagtgttatgtttgaagagggatttaatattataaataccaccttttcggagagcatggaaaatgtaaaaaataaagtaatagtggtagaccagtatggaagcaagattagcgaaaaaatagataatgaaatttttaaggaagtaaatgtaataatgcaaaaagtaattcagcaacaagaaaatcaagatgtagatattgatagcgagtttaatgggatagaaaaaagctgttctcttaaaggttatggagatgtaagttgtataactggtagaggagtaaaagttaaagattcttatacaaagcttgtaggactattttatatagatacagacaaacatacttggcaaaatggagaatatcaaattgagcttgaacttaattttcaaaatcttatggatgaaaagtcagcaggacaggatgaacctaaggaagaaagtaatttagggggagaagattatgcaggaggaaaagagtttacagcagaatttacagcttactgtcctagaaaagaagaaggtggagatacagattgtagaaagaaaaaacttgacccatctaaaaaaacttgcgctgctcctatggttggtaaatatgagcaaacttattatacaaaagagtttttaaataaacatcctttattgaactatggagatgaaatacaggtaattacaggagtttctggtcgtgatggagtctataaagtaaatgacgtaggacctgcaataactatagaaaaaaatggaacataccatatagatattttatttggaaatgttgaagaagctagtaaatttggaagaagaaaaggaaaaattattattggtggttattctggtaatgtatctgataaagctaaaatagtaatatcagaggcaaaaaaacatctaggtaaaccttataaatggggtggaaatggaccaagtagttttgactgttctggtttaatggtctactgttttaaaaaagttaatgttagtttgccaagaacgtcaaatcaacaatctaaaaaaggcaagaaagtagaacaaaaaaatcttcaagcaggagatttagtattttttcataatccagtcagccatgttggattatatataggtaatggagaatttttacatgctccacaaaaaggtgatgtagttaaaataagtaagttaagtagtagaagagattttaatacagctaggagagtattataaaaggatggtgatataatggctaatccaataaatgaatttataggaataataagagaagaaggaaagtatcataatcaaccttctttttttattggaaaaattaaaagtaaattaccagatttaaaaatagagacaaataacatcatattagaaaaagaagatattttgatagatagttggatgattgatagacagctagaaacatttgacacagaaacaaatcaagaacaccagcatgaagtaaaaaatccttttatagataactttgaatctggggatatggtaataatgtttagaataggcgaaaaatttgctgttgtaagtaagttggtgagcttataatgagtacaatatttccttttataggtgtcccagaggattatatcttacctaaaacagaagaattgccaatctttcgtgaagtggcatgggattttgaaaaagatgaacctattttagaaaaaggtgactttaaaataattgaaaaaaaagaagccttaaaagtttggatatacaagtgtataaagacaaatagatatgaacatgagatatactctttagaatatgggacagagctttcagaactaataggacaaaaatatacaaaaggtcttacagaaagtgaagctagtagattcataaaagaggcccttctaataaatccatatatattagaagtaaacgtaaaaagtgctaactttaacagagacgtattgagtgcaaatgtaaaagtatccactatctatggggaggtggaaataaatgtatagtgaccagacatatgaagtaataaaaaatagaactcttgaaaatattaatcttgatatttataaaggagaaggttcttttctaaacaacatggtatctggaaataatctagaactttcgaagatatatctagaactttcaaagatacataaaatggcttttatacaagacacatataaccagtttcttgataaaagagtcaatgaatttggtgtatatagaaagttaggtacagagtcaaatggagaagttgaatttattggagagaaaggaactgtaataaataatggcacaataatatcatatagagatttactatttgtagtaataaaagatgtaactattggtagtgaagaaggtgacaatagcccagttcaagctctggaagttggtaagaaatataatttacctacaaattgtgaatttaaactagttgataatatatctggagtaacaaagattactaacacaagaagttttgaaggtggtacagatatagagacagatgaagaactaaaagaaagattttataaaatccaaagaaatcaagctacaagtggaaataaagctcactatgaagaatgggctttggaagtagatggagtctataatgttaaggtttatccaagatgggatggtccaggaacagttaaggtcttgatatttggggaaaataatcaagctgttgatacagaaacgattgaaaggtgtcagcaacatatagatgaagagaagcctattggaccaactataacagttgtgacaccattaccaatagaaataagtataagtgcagtaatgaaactagaagatggatatacattagacaatgtaaaagaatctttcctagaaagtataaatacatactttagagatattagaggagagataatctatacaaaagtcatgggaatacttataaatactactggtgtacacgatttaagtaatctacttataaatggaagtacagataatataactattaatgaagataaaatacctagtgtaacaactgttaattttagtgaggtggaaaatcaatgaagctaattgataaactaccatcatttgatagaaattacattgtagaggagatacaaggtgcatacgatacagaattaaatattcttaaagaagatattgatgatacctttaaccaattatttgttgatacagcgacatggggattagatatgtgggaagacatactctgcattgaaaaaaaagaacttgattttgacacaagacgtagcaatataaaagctaaaatgagaagcagaggtactagtactattgaagttataaaaagtatatgtgaggcatatacaaaatcagaaacagatataaaagtttatagtgatgaatttacattcgtattgagttttatagcaaataactgtgactataaaactcttttagattgtagcgagatgattgaaagagtaaaacctgctcacttattacactatttagaaccaataatactagataaaagtatggtctattgtggtggaggtatggtatgtagtgaagaggtaaaagttcatccatactttgaaccaattataaaatgtagtgctgttgtaaactgtggagctggaatgttaagtagagaagaaataaaggtttatcctttaagcattaaatgcattgaaaataattgtaagattaatatagctattgcaaatgatacaggcgtagaaaatgtagtagtttatcctaaatcggaggtggtataattggaagaaaaattttatataatattaaccaaaattggtagagaaaaaatagcaaatgcaactgcactaggagagcttgttggattaaccaagtttcaagttggagatagtaatggagaatattatgagccaacagaggaacaaactgctttaaagaatgtagtttgggaaggaaatataaattctctaagaattgatgaaaaaaatcctaattggatagttatagagactattttaccaggaacagttggtggatttatgataagagaagctgctgttctggataatgagaataatataatagctataggtaagtatccagagacgtataagccacgtgctgaagatggcagtattaaagatttggttgtaaaaatgattttacaattgtccaatacttcaaatgttacattagaagtagacccgacgttggtttttgtaactcaaaaggatattcaagatttagatgataagtttgataaaaatataaaagaaataaaagtaaaaattggagatacagatatattaactacagattctaaagatttatcaggagctataaatgaggtagttaaaaaaatagaaaatatatcttttgatgatgttataagtggtcaaatacaaactgatatatcagtattaaaaaatagctataacaaattatctgaaaaagtgctagatatattaatatacctagaattagagtcagaagtaactgtagatgaggctggttattggtatgatacattagcaaatggaaataacatagtagctatagaagggcttaagttagatttaaatagaaaatgtataacaggtgaaattggtaatgtgatttttagagatgtagtattaccatttagtgcaaatagagttagatatatacatgatatggataataactttgttgagacaaaatctagtaacacttatttaaaagaacaaaaagatataactctaagtaaatattcatatgaaataagataaataaaggaggtagtactaataatgaagcaaaataaacttttacagcgtggtgcttattttaatgataagaacatattgattgatgattttgataaaagatataatgattatgattttgtagaattttttactggtataagtaatagtacctttggtttaaaatcagatggtaatttatatgcttgtggcgataatacaggttttcaactaggacttggaaaagattcgtcagagagaaggatgtttagtaaagtaaaaattgataatgtaaaatatgtatcttgtggttcaaaacacagtgtagcagtaactaaagatggatttgcatatggagcaggaacaagtaatgtaggtcaattaggtgtaattgagtctacagtatattatgaatttactaagctaccaatagatgatgtaaaaactgttgcatgtggttatgactttacatttgtgcttaaaaatgatggaacattatattcagcaggtttaaactcaagtggtcaacttggactaggtgatactaacaatagagctacttttactaaagtaaatatagatagtgtgaaagatgtagtgacttataatcaatctgtatttatcataaaaatggatgggacagcacatgcatgtggattaaattcaaatgggcagttgggaattaatagtactttaaataaaagtgtatttaataaaatagaaggtatggataatgtaaaacagatagcgtgtggtagtagtcatacaattcttattaagaatgatggaactatgtatactacaggctataatggagttggtcagcttggtacaggaaataataataattcaattgtatttactctttctagtataaataatgttaagtatgcttcttgtggaaataatcatactatgatattaaaatacgataatacactgtttagtacaggacaaaacaattatggtcaactagccaatgccaataaagatgtagcatcaagaaatacttttgctaaggttaatgtagaaaatataaaagatattaaatgtggttctcaatttaattttttaataaatggttcaaaagagatatttgtatctggctgtaatttagcaggtcaacttggttcattttttcatacaacttttctgtatgagttttcaaatgtgcaatcttcaaatttagataattattcaggtttattggttaatgatgattatttatatgttacaaaggacaatagtgaatttttaaatgtaaagttaagtgataattttcaagattataagaagatagagttaacagatagcaatatgtttattgttatgaatgatggtacattgtatgcttgtggtttaaataattatggacagttaggattgggagatactgttaacaggtcagttatgactaaggtggatatagataatgttttggatataaaaggaaacggaaactcaacttttgtgcttaagaataatggaacattatattcatgtggtttaaatagtaatggacaattgggtttaagagatgaagttaatagaaatatatttacaaaaatagaaatagagaatgtaaaggatttttgtgtaggaagcaattatgtcatagctttaaatcactcaaaagaagtatatggatggggaaataatccttataataatatagaaaaaacttctaattatccatataagcagggaataagtaatattgaaaagatagcagcatatgattattctgtatatatgataaacagtgaagggaaactatatgtttctggatacaattataattatcaattaggtaaaggaaataatagtaaccaaagcaaagcattagtatctcaatgtagaacaaattcaacatcttctacatcaaatggacttagaacgttacctaaaataactaatgtttttcctttttatgatggttgtgcaataattgacgaaggaggttatgtttatttaacaggatatcatggatatttaagaacattaaatagcagtccaagtatatctgattattcaagatatggaacttttattgaggctacaaattcaaatcataatacttattttatacaagagactgattttagtggaattgaaaaagtaatagggatgtcaaataatatattattttttaagaaaggaagttcatatattactggatatccaaaaacatttggctcaaccattactggacatagaagttatactagtattaattctgagagttctaatttaggaagtaattttataatatatcatagtaattccaagttatatggaaaagggattgctaatagtgggcaatttgggaattcaacaaatatagatggcacaagtaactatgatacaggattaaaagacataaaagatataattgtaaaaggaaatactgtagtagtagtagataaaaataacaatatatatgtaacaggaatgaatcagaataacaaacttgggataggggaatataacaacgaaccagtaaaaaaattcacaaatataactgaacaatcaaactcatttatatttatggatgatataaaagaaattacaacatcaagaaatacaatgtttatagtaaaaaatgatggaacagcctatgccacaggaaataatagttctggacaattaggattaggtgacacaataaatagaaataagttcactcagataaaccttgataatataaagaaaatatcaacaagtatagatggtaacacaacatttgcaattagaaatgatggaacactatactccacaggattaaataccaaaggacaactgggattaggtgatatagtaaatagaaatacatttaccaaagtaaacatccaaaatgtaagagatgttgttttagggactactcactcgcatgcaatcaaagatgataacacattatattcatgtggagaaaacactcatgggcaactgggcttaggaagcgaaagcaaccatccagacgtattgacatttactgtaaacaatataactaatgtaagagatgtgtactgctcagatacaacaacatttattgtaaaggacacaaacattgcatattgttgtggatacaataataattcacaactaggtatgggaaatactactgaccagtatagttttataaagtgtatggaaaatgtaaaagaagttataccaaatgaaataaatacctatataataacaatctataatactgcatatagtacaggtttaaatactgattattgcttaggtctaaatagtaatagcaatcaaagttcattttctgaaattccaatttcaaatgtagtaaaagtagctccaaacagaaataatgcagtacttttacttacaagtgaaggggatgtatatactgcaggcaaatgtagtaatggttcaggtacaggaagtgagactccagagaagattaaaaaaatagcatcaaaggcaaaggatattggaatgaattatagatgtggacattatgtaagtgataatggagacctatatggtacaggttttaataataatggacaattaggtgttggtgatgtaacaaaaagagatacatttataaaaaccaatacaagagtaaagaaaatacttcctttagaatatgcaaatatagcaataaaagatactaatgatatatatatttgtggattaaataactatggacaattaggtgttggaaatagatacgatagtagaaataatgataatagaatatttaattataagcatatgaattttgtaatgggtgatttgacatctattaaaaacagacataactttatacttctaaacaataagatagtgatacctaccacaaaagacatagattatggtttagtattaggaaatttatacaaaggagacctttatactgagcttccatatgaagatataaaagaagtatctatttctaagactcatattattatattacttaatgatggaacaatgtatggatgtggtacaaactaccatggagaattattgcaagacttgtctataaatcaagtggatgaatttgtgcagattaatgtatcagatgtaaagcatgtttcatgtggagataactttacttattttataaaatctgatgatagtctttggtctattggtaaaaattccgaatatcaattaggtataggtcacaataatccagttactgaattacaaagaattacaactatatctagctgtaaagaagtacattgtggtaaaaactatacattagtagtaactacaggtaatgaattatttgtacaaggatataatgataagggagctttaggattaggaagcgatagtgaaaatactataattaagttctttacaaaagcactaacagacataagagaaataaaatcttatggaagtgaccatatattagtacttaaaaatgataattcagtatgggttactggaaaaaatagggatgtatataaaattgaacaaccagtagaatttttaaaagaatttactatagtacctatttctgaagatgtaaatacagtaaaggatgtacttgcaacagacaatacattatatattatatcagaagtaggaacgacaaatgctgctatagaaattactgaaaaatcaatttcatcaattaagataaaaatacaagaccctaataaagatataagtagaatagaaatgcttataaatggtgaaagtgtaaaatctgtaagtgatttaactactgaaaaaatatcctttgaagtaccaccagataaaattaaaataggagagaataagatactatttagagcttattgtaaaggtgatgatttatatgcatctttatttatttttaaagagagtactggaaattctataattaaagattcttatgttatgataggtaatagaatgtacaaggtagttaatacaacatctaatgaacaagatattacaattacactagatagaggacttgaagaagatttaaatcttggagaccctatatatcaattaataaataaaactaaagttcaagtaaaaataaataaatctgacttattcaaagacatgaaactagttgaaatcaaaaaatcagactcaagttatcaagaaatctatgaattagaagaagccaacataaaaagtgctcagcctaaaatcatagtagaaaaaggagataaatggacagctataaaacgtccatctatgatttttagatatgatgctgaaaacaacgagccacaagcttaaaatggaggtgtaaaaattgtttaaattcgataaaaataaaatagaacaaatcaaacaaggtagaaaagtagaaatgcagtataaagacatttcagacataagtataggtcaagcaaagcaagatgatgatataacaaataattttatagcaaatgcagaaatatatgagatgttgttaagtcaaagttctgtcaatgaagcaagtaatataagcacttttagtgtaagaaaatctggaggtgagagtggaatggtagaagtatatgtagctttaattttaagaggcagaaaaacaatagaagaagtaccagcagtaattagagagcaagttagaattagatgtaaagaattagaaataccagttgaatagtaaatttagaataactatgtattagttattttttttatgtaaagtacaaggtcttaactttaataagtaagccttgtacttattttttgttatattagaaattgtatatatatttattatttattcaatctataaattaaacctacaatttaaagtacagaagattaaattgataatcctgaaaatataatattgcatgatgtaagaatataacaaaaattaaagctataagtataaaaaatttagacaataggaggctataatggataaattaataaccgaattgagtagtctgggggcaataggtatactatgtgctctattatttaaaaatactatgcaggagaaaaaagaagatagagacatgtataaaaaaactgtagaaaattttatagaattatctacacaacaacaagaaataaacaaaaatatacttgttcaaatgggaataatgaaaacagatgtagaggaaattaaggaagatgttactgatataaaaggtatgttacaaaacggtgtataacatgaaagtagcagtagcaccagattatatattattaggaaaagataaagtagtattgtagatagtgccctattttattgagaaggattttatattttaaaatattaattaaaaaaagtaataaaaataatatataaaaataacatataaaaattcaaaaaggagttaagcttaaatttgattagaaaaaatcaattttaagacaactccttttttttattaaattattgtctattaaccaaaatagctattttagcatctggattataacttatctgaaccatttgatttttcttaacatgttcaaggtcttcaccaccataagctatttgtaacttaactggtaacttaccttgttttataatagcaacgtactcttttttaccttttttctctaaactaatcaaattgccaacataaggtttaaagttctgatactttttactagaatttcttatgtagaagaaagcaccaacagcaataactaaatttatgccaagtgtaacccaagaattgattttaagcatagctccagcgattattatcacgaacattaaaacgataggtaatatagctttcttaagaagcaatttacccattatttcattagcctttttctcagggccactcatagtttttgatctagcaaatgattgcgcgaatttgtctcttaagcccattttatcctcctaattttaataaatatttagttataataacgagatattacttgaaactaaaaatttactacatttatattatgtttgacttttgtataaataattacattcaagtaaagcaaaatatactaattattttatcataaaattataaaaaagaaaataaatgaaataaaaatattagaacaaagaaatgatgtaaaatcgtatcaaaagcaacataaaaattatttatctattttctcatctttatttttgttatactcaatttttcctaaatccttctctttttcatattcatgaagttttaattcaatcataccttctattttggctttatcataatcatttaactttctaaagttgtttaaaagctttatttcattagagtttatgctattaagtggatagtttgaggaggaatcgcaaattaaatctgatttatgtgatagattatctccatttaatagccagtctactgaaacattaaatatctcagctatagattttaatatttcataatttggttttctaatgtttctctcaaatttacttaagttgtcacagcctaacatttcttctagttcatattgtttaaggttttttgcttttctcaaataaacaattctttctcctaaagtatccataaacactctccattcaattaatgtcaaaaagactttttaagatgtaaatagtttcaaattaaaggtcaaaatgacataaaaaccattgacttaaggtcaaaatgactttataattaacttaatgatacgaatttacatcctaattttagcacaaagtaatcaaaaaatcttatttagtattaaataaatttatatacttaatatgtgtacatattaaaaatatatactaaatagagggggtgcgtaagctaaagtaatataaaagtaaatataaatcacttagaaaggaagttgataaatggatgctcgaaaaaaatggataccttttttgggagtgcaagtcaagcaaagacttattgaattaaatatgactcaaagggaattagcgaagaaaataggtgttaatgaaaactatttgtcagctattttaaatggaagaagaacaggtaaaaaatataaatcatcaatttatcaattacttaatatagaatattcagaagatgattaataaatagtatataaagtaggtgaatattcttgtgtgcaaattggattcagatggggttatagagtgttgtagagcaattgatgattttattacagcacttagtaatataaaaagcttaaatatggaaagattaaatactttaactaaatattctagtacatgttcaatccttcttaaagaggggaattatgaaggatgtacaattgtgtatagaaagatgttggaagaattaaaaacatgagtaatgcatttcttaggaatataaattatacatagaaatgtattatatttttcaaagtacttaaactaaaatatggataagataatctaaatattataaatgtgcttgaaattagactatacttgtttttaaataatccaatatccatattttagtaatatactacaaaaaaagaaggttaatagatgatgtaaaatcgtatcaaattatgtatgtttaaaccattttatcttcattattattagaggaatgcttttttaagtctttatattcagatatcttaagttcaagtattccttctatttttattttatcacgttcgtttagttgtctgtatagatttaatatcatcatttcatcattagtaacatgtaagtaatcttctttatcttcttttacactactattgacatttaccttctctttaccatagagaagccagtcagtcgtaacattaaaataatcagctattgacattagtatatcacaattaggttttctatctcctgtttcatacttgcctaagttttcaaattttaaaatatccataagtttgcgctgagtaagttttttggagtttctcaaataagcaattctttttcctaaagtatccacaaaatacactcctttctttttatgagtaatgtctaaatgacatttgaaattaaaaatatataaatttataatataaaactactaaattaaagtctaaatgacattttgcttaaattaatatgctcataatatgattttaacatattatagttgaaaatatatggtttattttgatttgtatatataacaatagatttaattgttataaaaatgtaaaggggtgtatgaatagattgtataaatttatttcgataaactaagattgctttttgattgtctgtaaaagagaaaaagattaagataaaaatagtattatattgtaatttatattaatcaattacaaagattttatgaatttattctttagggtaaaatatttaagaataagataaatttacaatataatactataacactcttttatctagttttattttctttatagaacaataatattataaatgctagtagatttacacagaatactgttatatacatctgtttgaatcctgagtttagagtagattgtagtgtattttctatttttgttctattattttctatggaatttatataatccaattttgatttatcaaaagcctttggtatttcagtttttacctcttgtgtctttgctaaaactgcttggagtgattttttttgctgttgcattgtatcaaggcttttttccatgtctttcttttggtttatagaattatttaacttgctttgtagctctttcttttgagattccattgatcttagttttttacttaattcgttcttttgagttttatttttttgtaactttgtatttaagtcatctcttgtcttttttagttgctgtatttgagcatttaaactttctttttgttcatttacatttggtttattctcgctggaattgttattcttattttctgtagaatcattcttagtgtcgtctgattcagaattactggtattactctggttttgttcatttgagttattttcgttatcagtaggagtcttttctgtagtaggtattttattataagcagttgtaagttccttgatggcctcatcttgtttttcaagaccttgttccataccttttatacctttgtcaacaccagcaatacctttttttacaccatctattccttgattaataccagctctagcttttaccatattgtcaataccagtttgaactcctttaataccactatttagtttattttcaccatcttcaataccgtttattccactttgtgttccatctattcctttttgtacatttttctgtattttagtaattatagatggaactttttcatcaaacattgttgttgatatttcttttgttatattggtaatgttggttgtatctgctgactgaactttattaagtaaggattttggaagtttgccacctgtcatgtccatatttatatttgaagtatcattcatatttgggatagagacattttttaaattttttgccatttcagggtctgattttaagtcatctatcatgttttcaagttcttcaagttgaactattttaggagttgagggctttccaactaagtccataatattatcttgcacagataatcctgcatgtgctataaatccaatcattatagctggagaaattgaagtaccaattgagcgtatcaaggataatgttgcaagtgctgaattagattcttctaatcttgtatttgataacatcatatagtttagaggagttcccatagtaaagcccattcctaatcccataaatattaaacttacacatacactaaatacagtattggtttttagagcaattaaaactaggtaaagagagcctatcatagatacagaaaatcctagtaatagtattttctttgccccaaacttgtcaataagtcttccgcttaaaggagcagcaatacctgcaaataatcccaatatagctacaaaatatccaccagaaccagcatttatctttaatgcattttcagcatactgtggaacgaataccatacccatcattccaataccaacaattaaagataaaataagtactatcaatattctcggatttaaaaaatattcaaagcttaaaatagggtctttagctctattttcaataaatatgaaaataggtataagtacaataaatgtcaataagtatggataaactgatatatcttgtatagaatttttaaaattaaaaaagtctatattcataagaccatataatagtgatacgattatacatatcaacatcaatgtaccaagcttatctattttttctttagattcagacttattgtttttaatacagaaaactccaccaataagtatgattaaacaaattggaaggtttacaaaaaatagccacttccaattttgagttccaaagatacttagaattgtgctaccaatgcttgaacctaaaatattggcaataccatatgttgccccaactaaacctaaagccatgcctcttttattttctgggaaggtagttccaaattctgctgtagcaattggcatgattccaccaccaccaattgcttgaataacacgaccaattaataaaatatagaaattggaaaatagtgatgataatccacatattaatgaaccactaccaaatagaaatatactaactagatacacatattttcttcctattttatctgctaattttccagagataggaattacagaagcgtatgttaatgtgtatatggtaatcatccaaattcccgttttttcatttactccaaggctattttgtataatcgttcttgctggtgatactattccagtatcaatagctcccataaatatacctaatagataaagtgtaagtactaaaaatatttttggattactgtccttgttcttaatactagtattatgattcaaggtaaacaccaccttaatgtattaatttttcaatatagggttttaaatcttcaaattctatatgaagatatgttgaatatgaaaaaaacatttttattatgatattgcatactaatttgtcattattaaaaaaactttctttttctaaagcttcatatactttatttgaaagctgttcatgaaagtcgtctttgtgttttttcatttcaaaaaatctctctgtttcaaaagtgtttaaaaagtcattgtattggatattatgaactttgtttataaaatttcttatttcagtaaaaataatgtttagtttttttatgtaatcttcagtgtttttattggagtattcaattcgccttatcaataaatcccattcagattttgtgatatattctattatttcttgttttgaattaaagtaattatatactgtacctgcacttataccacacctttgagctattttccttatgctaatattcgagtaatcttcttctaaaatcatatcccgagatacttttaatatatcttcttttacattttctaaaatctttggcatattaccacctcttttattaaaattattatgaacactgtttattatactcctttaaaatttattaatcaatatgtaagctataatgtataatattattatatagatatgatagaaaataagtgtctttttataaatatctattatattaaatttgtacttaagtatgattatttattgaaatatgtgatattaaatttttctttttaataaattaaatattatatgataaggagaatatggtgatggaaaagaagtatgtaatggcattagaccaaggaacaaccagttcaagagctatactatttaataaaaaaggcgaaatagtgaaaattgcacaaaaagagttcaatcaaatttatccaaaagctggatgggtagagcatgaccctatggaaatatgggggtcacaaagtggtgtaatgagagaagttatagaaacagcaggtataagaccagaagaaattgcttcaatagggataactaatcaaagagagactacggttgtttggagtaggtatactggtaaacctatttataacgcaatagtatggcagtgtaggagaacatcagaaatatgtgatgaacttaaaaataaaggattggaagaatcaataaaagaaaaaacaggtcttttaatagatgcatacttttcagcaacaaaagtaaaatggatattagataatgtagaaggagctagggaaaaagcagaacaaggagagttattatttggaactatagatacatggttaatatggaatttaactcgtgggaaagtacatgtaacagattactcaaatgcatctagaacaatgatgtacaatataaatgatttagaatgggatgaggatatattacgagaattggacataccaataagcatgttgccattagtaaaaccttctagctatgtttatggtcatacagatgagcgcatgttatcaggagctaaaatacctattgcaggatgtgctggagaccaacaagcagcattatttggtcaaaattgtgttgaagaaggtactgcaaaaaatacttatggaacgggttgtttcttacttatgaatacaggcagtaacatagttaaatctaagcatgggttacttacaacaattgcttggggagttgatggaaaagtaacatatgcattagaaggaagtatatttattggaggagcatctgttcaatggcttagagatgaattaaagataattgaatctgcaaaagatagtgaaatgtatgcaaatagggtagaggatactaatggtgtatatgtagtgccagcatttacaggtcttggagctccatattgggatatgtatgctaggggttcaattttaggacttacaagaggagcaaaaaaagaacatatagtaagagccacattggaatcaattgcttatcagacaaaggatgttttagaagcaatgcaaaacgattcaaaattaaaactaaaatcattaaaagttgatggtggagcaagtaataataattttttaatgcaatttcaatcagatatattaaatgtagatatagatagacccaaaatagtagaaactacagctttaggagctgcttatttagcagggttgtctgttggattctatattggaagaaatgaaattacttcaaagtggtcagtagaaaaagagtttaatccaaatatgagtgaagagaagagatgtaaattatataaaggatggaaaaaagctgtatcgagagctttaagctgggaaaaagaagatgaattggatatttaaaaattaatcaaagttaaatttatttgaatttaaaaagagctttatgtaaaatatgaagctctttttttgttgttaattttgcatttttatataatcatactaaattatataatttatttttcgttttcatataaaaacattggtatagaattgtaaatgtgttggtcaccaactactaagagaatgtctccttctaaaaattcaatatatggtccaggagatattataagttcttcacctcttttaattgcaactattgtagcacctgtattttgccaaaatttagtttgtgcagctgtttgaccaatatatttgcaattagaatttatggtgaactgaacgggcactaaaggattgattatttcaagtctgttggaatagtctaaaattttatttatagtatctaatatttcattttctaaattagatttagtatctattaaattataaagtgttgatttatatgatgatatatttgtaatatctctatatttttttataaaagaagaagctttgtctggagatagtacaataacacctttaccctttatgcttttaacaacgccaatgtcctctaaaattttgacagctcttcttatcgtttctggagatacattgtatttaccagccaaaacagagcgtccaaatagtactgaatcctcttgtatttcacccgtgtatattttatttgcaatatccaacgctattttttggtatattggcatcgtatagtttttatccattgtttttcccccaatacaaaatttatgttaaaaaaatatataatcttaacaatactattgtataatttataggtttatatgtctacaatatgtacaaatattgtgcatgttttaaaataatattttaacatgcatttagtatacatgattttattatacttaaaactatataaagaattaattataaaaatataaagatattttacttacaaagaatgataattatatagatgaaagaaacaaataaatgaagaaaaatgattctgtcttgcatataaagtgattaaaaatgaaaaatactttaaaaatgaaggttaaggcccttattttaagtgaaaataattaattattaactaaaaaatggtaaaaagattttttgaaaaagaaatacaaatgaatgttcaattaaaataattgcaaaaatattccttaaatggtaaaattatattaattaaatgcaatagaatagttgcaaaaataaaattgaatacaagtgataaaatatttcatgcaatatataaaataaacaaaatttaaaaattaaaactacttattctatcaaaatgttagcaaggagggggtcataaattgtataaagtagatttaaatagtgatttaggagaaagttttggaacgtataagattggtttagatgaagaagttttaaaatatatttcatcagctaatatagcttgtgggtttcatgcaggtgaccctagtcatatggaaaaaacagtacagctagctaaaaaaaatggagtgaaaataggcgcacatccaggtttcctagatttaataggatttggaagacgtgagatgaaaataacaaagcaggaagctaaagattatacaaaatatcaattgggtgctttaatggcatttgcaagttcaaatggatgtaatatacaacatgtaaaaccacatggagcattatacaatatggcagctaaagataaagagttagctatggggatttgtgaagctatatatgaagtcgataaagatattatactgttggggctatataatagtgaaatgataaattctgctaaagaaattggacttaggtttgcaaatgaagtatttgcagatagagcttatgataataatggttttttggttccaagaagtgtagaaggagcagttatacatgatacaaaacatgcaatagatagggttgttaggatggtaaaagaaggaactgtagaaactttaacaggtgaagttatacatatcaaagcagattctatatgtgtacatggggacaatccaaaagcaatagagtttgtcaaagaaataagaaagcgttttgaattagaaggtatagaagtttgtccattagaaaacatagaagtttgttcgtcagagaacatagtataagactgataacatgagggggagataaaatatgagtacaaaaaatattacagataaaactaaaaataaaaaagatgtcggagcacttataggggctgcatttataatggcaacatcagcaattggaccagggtttttaactcagactgcacaatttacccaagattttggaccaaatttttcatttgtaattttaattacaacaatcctttttataggggctcaagtaaatgtatggagagtaattggtgtatcaggacttagaggtcaggatatagcaaataaaataataccgggattaggttatttagtagcttttttagtagctcttggaggattagcttttaatataggaaatgttggtggagctgcacttggtatgaatgtaatgtttaatatgaatatgacattaggaactgtattaagtggattaatagctatatttgtatttatgtcaaaaaattcaaattctctagtcgataagataactaaatttttagcattaggaatgataattatagttggatatgtagcaatatcaaatcatcctcctgttggagaggcagtatcaagaatggtaaaaccagaaaatccaaaaggattgatattcccaataataactctacttggaggaagtgttggaggttatataacttttgctggaggacatagattaatagacggtggaataacaggagaagaaaatataaaagaaataactaaatcttctcttttgggtatattagttgccacaatgatgagagttcttttatttttagcaatactggcagtggtttcaaaaggtcttcaacttgacccagaaaatccagctgcttcagcttttaaatttagtgcaggagcaataggatataaattctttggacttgtattatggtctgctgcaattacatcagttataggagctgcttatacatcagtttctttcttaaagacactaaatccttttatagataaatatgaaaaatattttataatagcatttatagcaatatcaacacttataatggcatttataggaaaaccagctactttattaattttagcaggagctttaaatggattgatacttccaatcacattaggaattatgcttatagcatctaaaagaaaagatattgttggagattacaagcatcctacatggcttttaatatttggattaatagtagttttaatatctgcatatacaggaataacttctcttagcagcctaggtgctttatttgcttaatttagaagaggtgacatttatggaaactagatacttgatatcaggggataaggcagtggttgctgaatttggaaatgagatatcagaagatataaacaaaaaagtaatttcatttatgagagcaatagaaatatcgaatcttaaaggtattgtaacagaaatggtaccaacatataggtcacttatgataagttataatccattagaaatagattttgatagtttgattgagaatttaaaaaaaatagaagataatttggaaagtatagtattaccaaaacctaaaatacatgagattccagtatgttatgatgaggtttttggtatagatattaaaaacgttgcaagctacaataatctcactgtagatgaagttataaaaatacacacaagcagagagtacttgatatatatgctagggtttactcctggatttccatatctaggtggtatggatgaaagaatagctacacctagattagaagtgccaaggactaaaatttatggtgggagtgttggaatagcaggttcccagactggtgtatatcctattgatagtcctggtggatggcaaataattggtaggacacctttaaaattatatgatgaaaatagagaagaacagattttgcttagagctggagactttataaaatttgttccaataacattagatgaatttatagaaatcgaaaaaaataacttaagtatttaaatatcgttatagtacagggagtggtatatatgggattcaaagttgaattaggaggtttccaaacattaatacaagacagaggtagagttggctatggtcaatatggtgtatctggatgtggagcaatggatgagtatgcacatagagtaggaaatatattagtaggaaattctgaagatgaggcttctttagaagttttaatgttaggtcctacaattacctttgatgaatatacgcaaatagcagtaactgggggagatttaggggctaaaataaatggaaaagaaattcaaaactggaggtcatatcaaataaatccaggtgatgtattatcatttagaggtgtgaaatcaggtgctagagcctatgtgtcaatagctggtggaatagatgttccacttgcaatgggaagtaagtcaacttatacaagatctaaaattggcggatttgaaggtagagcacttaaaaaaggagattatataaatacttttattcaggaaaaagattttacaataaataaaaaattaaattcaaaatatattccaacttatagttcagaaatcgtactaagaattgtaaaaggtcctcaatttgatgctttttctaacggtgaagtagagaaatttttatcaaataaatacaaagttacgaatgaaatagatagaatgggttgtagactagatggagagagtataaagcaccttaatggagcagatattatatctgatggtatttcttatggagctatacaagtacctggtcatggaaaaccgattataatgttatcagatagacagactagtggtggctatactaagatagggaacgttataagtgtagatttgtataagttagcacaagcaaagccaaatgatgtagtaaaatttgaacttgtagatatatatgaagcacatagactattgagagagcaagaagataagattcaagatatctacaagagtatgaaaaatataagagttgtaaaggcaaaagtattaaatgatatagcagtttaatttaattttaacaaatacaatttttattataatttataatataacttacaaatagctatttactatttaccataattaagatggtttagattagtcaaatagctatttttttagtttgagtaaatattttaaatttaaataaatacttcaattttaaaataaaagcaatatttaaatttattatattatctacaaaaagtaggtgtgttatgttgagtttatttagattttattggccaaattggaggtgatataactccatatccacgagctattgtatctttacttggattgatgattttatgtggtacattagcttttataaatgttgagtcacctggatttaatctaactaccttttcacccatacaaatatcaaccacaccactcgttaccaccataatttcttctgatgcatgatagatataatctttagcatcctcactttctggtttaagttcaaactctacaaataaaattgaaggtgtaaattcagttgtaggcattggagatactatctcgtaaaacatttcactctttggaaatttcatcataactctatcttcttttctaattactaaatcatcagtattattgtcatccataaacatatataaaggagtgtctaaaacttcagcgatttttctcaatgaagacaaggatggttcaatagcatctctttctatttgagagatataacttatagataaatctgtcaatttggaaacatcacttaatgtttttttcttgctttttcttatatttctcatcttttcacctagcataagaacctccaaataataaaattaatataaaatattcgcttaaaacaaagtaattatagcacaacatagaagtagtggcaataagaatacatagtagattttgacaattaaaatttaattaaatccaaataaaagtctatgaaaatgaattattgttaaattaatataaagaaaataataataaaaaaatttaatagaagagtattaattgaattaagattatcacattatattttggaaaagagtaaattttcagtaaattatcttgacatatatattgaagtaataatataatttaaagtataaaattttaaaaattgaattataacttcaaaaaataaggagggtaatatgaagataacagatatcaaatttgaaaagcttagaattaaattaaaaaaacctgtagtagtttcatttggagtaattgaatatggagaaagtgtaattttaaaaattgaaactgatgaagggtattgtggatttggcgaagcagcacctcttgcagcagttacaggtgaagttttggataatgttctttcagtattgcttatgtttaaaaaagagttaataggcaaagacccactagatattgaaaccatacatacaatcatggatggaattattataggtaatacttctgcaaaagcagctattgacatagctttatatgatattaaaggaaaaattatgaatgcacctctttataaagttcttggaggatttgatagtaaagtccaaacggatattactataagtatagataagccagaaaaaatggcagtagaagctttagaaagagtaaaagaaggttttaggatattgaagcttaaagcaggtataaatcctgaagacgatattgaagctgtaaaattaattagagaagccgttggagagagtataagaattagaattgatgcaaatcaaggatggaacgtaaatagcagtataaatactatcaaaaaattagaagaatttaatgttgatgcaattgaacaagcacttccacattgggatttagatggtactgcttacataagaaataaaagtaatacaaaaattatgatagatgaatcgttacattcaccaatagatgcaattaaggctataaaaaagaatgcagttgatacatttaatattaagctgatgaaatcaagtggaatatatcctgctataaaaatcaacaacatagctgaggcaagtggagtaaattgtatgttaggatgtatgctggaaacgagaattggtataacagcagcagcaaatttaatagcatctaaaaagaacataacagaagctgaccttgatagttttatgttttgtgaagaatcaaaagatatatctggaggatttgtaatggatggagatattatgaatcttgtcaataaaccaggtttaggaatagaagtaaacttatgataaatttggaggttaaatatgaatacacttttttcaaatccaggtagtatacttgctgtaatgacatcaatgattgcattgggtttttacttacaaagatacaaagccattaaaagcttaggaccagcacttacaataatcataatgggaataatactttcaaacttaaaagtagttccagtaagtactgagttatatggaactatttcaacatatgctatcccagtttctatgactataatgttgatgagtgttgacttaaaagaaatgacaaaattatcaagagaacctttaattgcaatttttgtagctgtattaactgtaagtatcatggcatttttatttggattagtatttgcagaaaaaatatcagaaggttggaaggttgctggaatgtttgtaggtacatacactggtggaagtgctaatcttacagctattggaacaggccttaatgtaagtagacaaactcttgctgcagcaaatgcagcagactatgtaattggagtaccaacattgatatttatgtttgctctaccagcaatattaaaaaattcaaagaagtttaaaaaactttggccatatcatgtagaagaaacagaattagaagattgtcaaaatgaagaatttatggagtcaaaagaatggagtattaaagatatagcttggatgttggctataggttttgttgttacagaagtttcaacaatacttgctggatatttcaattcaagttttagtagtgcagcaagaatacttttagttacaacaatttcaattataattgctcaattaaagccagtaaagaaactaaagggaaatttagatttaggattatttgttgcattattctttttatgtacaataggtttttcagtagatataaaagagtttttaggttcaacttttactataacactttactgttttagcataatttttgcttcatttgtttttcatttaggcataactagacttttaaagataaagtatcaatatgtaatactttctatagtaggagcaattgctgatggtcctacttcagctttagtagctgcttctgcaaagtggaattcgcttgtaagtgtagcagtcgtaatgggagtaattggtggagtattaggaaattatgcaggtatatcagtggcatatgcaataaagatgtctctaggattataggggggagtttaattgataaaatttaaattatacatatctggactatacagtggaaatgtaatctttgatggcgatttattaattgaaaagttgaatccttttacaaataaaatagaaagtttaaaaccaataagcaaagaagaaaatacatactatttaaatcttacaaaaatagatttaaagtctttatttaataactttgatgtatatactaaaagcttagtaaacacagataaagacacagttataaataacttaggagaaacgcattctaaacttaatgaatatatatgggttcaaagaaacaaaaagttcccactagatataattattgtagataataaaatagtaggttttatctgtttatccagagaaacttgtactatattaattatggatggatatgaagagtatactgtattaaaagaatgggaaaaaacccataaaaatgaagagatatattctataagatttggtggaaattatatgattgatatgaaagatggtataaaactttctacagatgtatatctccctgattttgtagattctaccaaaaaagcaccaacaattcttatgagaactccatatggaaaagaaaatgataaagaaatatattataaatatgtacaaagaggatatgctgttgtaatacaagatgttaggggaagaaatgaatcagaaggtaagtgggaacctatgattcatgagagggaagatggagatagtaccataaattggatagtatcacaggaatggtcaagtggaatagttggaatgcttggagcatcatatcttggttatgtccaatgggcagctgcatcttcaggcaataagcatcttaaagctttagttagtatagtaacatcaggaagcccttttattgatataccaagaaaaggaggagcttttgtatctggtatgcttgcatgggcatttatggtatcaagaaataaagttgatagaagtaaaatggtaagagatgattgggatgatgttttaaacatacgaccaatagaaaatatacctgttgaagctcttggatatagaattgaatttctggaagaatggttaaagagagtagaaaaagatgagtattgggatttgatggattggcatttacaaaaagataaaataaatgtacctgcattggttgtatctgggtggtatgatgataatagtatgggaactacagaggccttagatgttataaaggactatgaaaaaggaaagagaaaggctattctaggtccatggatgcataattcaaatactttaagagatataaatggtatttctttaggaaatagttcattaagatatgatttggattataattatctattatggtttgataaatacttaaaaggtatagaaaataacatagatacgactgctccagtagagtattactctgtaggttttaataagtggaagacagaagaaaattggccaataataaataagatagataaaagtatgtatctaataagtgatggaaatgctaacacatctttaggaaatggtagattagtatttgataatgatttagaagaaaagtatgatagttatatatataatccaaaagacccatcagtacaactaattgatatgtcagagaatgaagttggagttccaaataactacaaagatttagaaaaaagaagtgatatgttgtgttatacatcagatgcttttagtgaagaatttactgtaacaggtgatataaagttagagttttttgcatcaagttctgccaaagatactgactgggttataaaaattatggacgtggatttagatggaaattcaattaaattagctgatggtatacttagtgctagatttagaaatagtttttataagtcagagtttatggaagaaggagagatttataagtttacgattataacttcaaaaatatcaaacacgtttaaagttggtcataaaattagactagatataacgtctagtgctaaaaactttattttccaaaatagcaacacgaaagagggatataatagtattgaatatatagaagcaaagaatacgatttaccatggaggtaaatatccatctaaattgatattgccaatagaaaataagtaaatttatatagattaaatagtgaggaggtgtctcaaaatgaattttttagttcgtgagacactttcttttatacgaaatcaaatatattttcatcatttcaacaatgaaaaagaggcttatctctctgttttgagatagcctcctataagctaaattgattattttgtagctgcaacaacgctcatttcaactaacaaatgctctctagcaagtctagcttcaacacaagctctagcaggttcaaatcctttttcaacccaagcatcccaaacagagttcatagcttcaaagtctttcatatctcttaaataaatagtaacagatagcaaatgttgcttatctgaaccatatttgtttaataaatcttctattttagctaaaacttcagttgtttgttcaattactcctccttcagcatgagtttgtccacataaataaactgtattgttatgaactacagctctactcattcttccagttccttcatatctctttatttccatattttaaatacctccatagttaagaaatctattaaaaatctaaataataaattaaaaaaagtctatactatataaaattatattatatattctgataataatccataaaaacatataactttttagctataattattattgttattaattgaaaagacttattagttacttgacatagtttacacttttaattatagtataaattggaatatttagataattattatttaatgtataagctaagtttttaattaatatggctttatacatttatatagaaaagaggtacgtatgagtagcacaatcaaatcaaatcgaataaaaggtataatgtttataatagcatcagcgcttggctttgcaatgatgtctgcattcgtaaagctagctggagatttaccaagttttcaaaaagtgttctttagaaatctggtatcagctataatagctttttggcttatcataaaacataaaggaagtctaactggtaaaaaagaaaatttaaaagtacttttatataggtcaatatttggaactctaggagttatatttaactactatgcaattgacaagttgatgctttcagatgctaatatgctaaataaaatgagtcccttccttgtagtaatattttgtgcaattgctctaaaagaaaaaataaatgtaaagcagataggagctattataattgcatttataggagctttattcataataaaaccaacatttagtgtagaagtaattccatatcttgggggaattgcaggagctgtatttgcagcaatggcatatacttgtttaagagttcttggagatagagaagattactatacaattgtatttttcttttcagttttttcattagttactgtagggccaattgcttttgcagtatatgaaccaatgacccttatgcaacttatatatctattactaggtggagtatttgcaagtctaggtcaatttggaataactttagcatataaatatgcacctgctaaggaaatctctatatttgactatagtaatataatcttttcagcaattttaagtatattcttattcaatgtctatccagatatgttaagtgttgttggatatttaatagtattttcggcagcattttatatgtttttatacaataagaagttagataaattagacaaagaaaagaagaagtaaactagataaaagtgtttttataatttgtattgaatatttaagtctttgtattaaaattaaagaaaatttaattaaaaatgtttggtatattaacttataacagcagttaaaattgaaaaattataactgctgtttcttttattaaaaatatccaaatgtctgtaaaaatagactataatagagtagtataaataatataaaggggataaattaaagtatggaaaaagtgaaagttgctgtgattggagcaggtaatagaggaacgtatgcatatgctccatatatttatgaaaattctgatatatgtgaaatagttgctgtagcagaacctaaaaaaggaagacgagaactatttacacaaaaatataacctagatagtaaaaatgtatttgaaactttagaagacttttttaaacatgacaagatggcagatgcagtaataatagctacaaatgatgatagacattatgatgtagcaaaactagctcttgaaaaaggttatcatgtactattagaaaagccaatgtctaatagtttagatggtttggtacatatagatgacttgtgtgataagtataaagataagatttttatgatttgccatgtactgagatattctccattttataataaattaaaagaaattgtagaaagcaaaaaattaggagagctagttagtatacaatataatgaaaatataggatattggcattttgcacatagctttactagagggaattggagaaatagcaatgaaaccagccctttaattttagcaaagagttgtcatgacatggatattttgttatatttagtaggaagtagatgcaaaaaaatatctgcatttggaagcttaaagcatcttaataaccaaaatgctagtggagagatggcacaaaattgtcttcagtgtttagttgaaaaaaaatgtccatattcagcaaagagaatttatttagaaaaagatagaagtataaatagagctgttcacataaatccaactgaagagaatctattaaatatacttaagacaagtccatatggaagatgtgtttacagatgtgataataatgttgtagacaatatggtaaatatattacagtttgaaaatggagtgacggctacttttaatttatgtgcatttactaaagaaaatggaagaactataaagttaatgtttagtcatggtgaagttggtggggatttaaataaaaatgagataagaattaaaaaatttggaaaaaacgaagaaatagttatgaatccatcaaatcaacagaatatggtagaggaatatgatagaaatcttatagctgaatttattaaattagtttcaaataaagaactagaaaagggtagagtagcagcaaaagaagctatacaaagtcatgtaatggcatttgcagcagaatattctagggtcagtgatgaagtagtgtatatagaagaattttttgatagtgctaagcaaatgactaaggagatagaagaaactatattttaattaataaaaatttattaaataaaataaagatagattaaataatagaaatacgaaaatatgtgttctattaaggaatctatcttttttattaaggttttttcttatccctatcaaaaaaatccatacattctgataaaagataagaaagtaaagcgaataagatttctgtacttaaaggaatcgttactgaatccataaaggtatcaattatgttcatagctagaaaagttagtataaaatcaattataaattcgcaaagtttatatattgagtatggtaatttgtttacatatctgaatatatctaaaatagtagtgcatagaaaatcaattggagtggttatacaaaaatatattaaaaagaaaattaatacagctccaagagatttatattcaaatcctaagaatgataagaagccaattcctataaccgtgaaaatacaaaaagttataccaaaaaaaacagcaaaaaataaaaatacagaaataaattcgcctaaaggaatccttcttttattacttatcttaatcaactccttaatttatgatatgaaatttatataaataataacattcttaaaaattcataatagtcctctgtttcaaatagtactgtttgagaatctatttttttcatatttggataaaaagaggccttaaaagctttataatgttctctaaattttatttctatcttaaatttatctggcaattttattaagtgcctagataaatctccagataaagcttttttgacacctttttcaattttttttagtgcaaggtttggatggattgaaattgaaccatttccaattccttttgacacaggaacagtgactatatttggatttagtttttttgcactctcacaaagcatttcatctccacttaaaaatgctacaggaacattataatatgcagcaatataagcatttatagtaaattcagatgctatttcatcatttattttaaaatagtcataatcaatatccatagtatgagaaagtggattaccattacaagtagctccagagtgatagccggtgaatatacatgcatcaaagctttcatcaattccagccatcataactagtgggtctttggtccatcctctaagtattttgacgttttcaggtaaaatatttggattaatatttctaccactgtcatgtgcatctttaacaagtatttcatgtacaccagattgagtagctccatcacatgctgctgttatctctttactcatttgtgttctatagtgttgtgaaaattcacattcaagttttgtttcatcccaatttacaataccacaagtaccttctatatcagcacttaaatacaatttcataatatatacccccttatgtttattattgatgataataacagataacagaaaatacataatcaataaagggcataaaaatattatgtcttactattaattattattaaatctgtaactgaaaaataactaaattggtattaaaaaatataacactatgtgtcatttatttatatagttttttatatctgatgtttatataaaattgtaacatataagtggttacatttactagtttaacatagttaaaatagttaggtattatttttaagttaaattgattattataaaatcgtagaataaaagaaaaatttaatttattaaaatgcatgaaatgttttttcctcaacataatgctaaattaaactcaaaaagaaataatagaaaaatcttatgtagcttagaaagaatgtgaatgatttaagggaaaaatagaaatttattatataatattaggctgtattatgtaatacagcctaatattatatgtatatgtgacataaaatcttggtaagtgtaaataaaataaatgtggaaaacaaattaatgaaatcaagaaaaaagtaatttaaaattcaatttcatcttcccaattaaattctcctgatttttctacactcttaggccagtgactacaccatttaggaacggacggattttcaaccctatcaacgcttggagtatatggctttaagtctataacaggactattatcattagcatcaatatatggtatttttattataccattttcatggtcgatattgataatttgtacagcagtcaatgctattggattgggtcttataggtgaccttgttgcaaatattcctataacgtttggtccacttttataaggttttggggtttctaaaatacttcttagttcaggattatcaaacccatcagcccaccaaaatacatttaaatgactgaaatcgtcgagttcatttaatgcaggtacatactttttgtctaatttaataaagacctcttcgccttgaatacatattttacctataggatttattaatatttctttcataatattacctccaactatttaatttatcatttgtaattttagggtataacatgacatcatgtgagggtcaatataaaataataaataaaaatattaatagttagaatgataatacattttttacatggagcatgacaccagtaataaggcaatcttcgtcaatatcaaaagtagaggtatgcaaaggggaagtaatgtttttttcacgatttgcacaaccaaggtggtaaaaagctccttcacagtgtcttagaaaatacgaaaagtcttcagccccaagagtgggcgagtctttaaggataatattttcttctccaaacaattctacagcattttgcttgacgtaatctactagatggtttgaattgataagagctggataaccttcctcaatttcaacagaaatacttcctccaaatgttttacaagtaaaatcgcaaatttctctaattcgtttttttgaaaactctctagtttcaggagtcaaggttctcaaagtaccccttataaccactttgtcacaaactatattttccttgattccaccttcaatctttcctagagaaataaccacagaatcagttggatttgtgtttcgactaacgattgtctgtagagctgtaataatatgagcagatataacaatagcatcaataccttgatgtggataagctccatgacattttgaaccatgtacagttaattgaagtgtatcggtggaagcatttagagtgttgtattttaattcaattagatttttgttgatattgggatttacatggagtccaaatatatattttacatttgggttttcaagacatccatcttctatcataagttgagccccaccaatagtttcctcggcaggttgaaaaaagaattttacatttacatttaagtaattctttaatttaaatagtatattacaagtacccagtaaaatagcagtgtgtgcatcatgaccacatgcatgcattttaccaatattaatagatttataagaataattaagttcttctgttataggtaaggcatctatatcagctcttatagcaactgtttcaaagtttggactcacgttaatgtatgcagttatccctgtatgattcttatattcaatataatttatacctatttcatttaagtatttaataatttttttcttagtttgaaattcttctaatccaagttctggagtcttatgtaaatctcttcttatatttataatccaatcatttatctcatgacaaagagttcttatattaagcataaaacacatcctaactatattaaaaatttatttttcttcattaattatattattttatgtaaatcattattatgtatcaagtacaaataaaatatcttataattatattagagatatttagtatggagaagaatatatcattttataagaagaggtgtttaaatgttaggaataattgcgccatctgggccattaagaaatacaagtttggaggaaataaagtttaatttagaaagttatggttacgaagttaagttttctgaaagttgtagtttaaattataaaggttatttagctggtaatgatgatattagagcaagggatatagaagatatgtttttagataaagatgtagatataattatgtgcttaagaggaggttatggaacaacaagaatattggataaaataaattatgatataataaagcaaaatccaaaaccatttataggtttttctgatataacaggtttaaatttagctttttataaaaattgtggacttttaccatatcatggaataatggcagcaaatgtaggtaaatgggataaatttacctataaatcattggtaaatgctttagaatttaaagatgacttatatttagaaaatccaaaagaagaaaagatttatactgtatgtgaaggtaaagcagagggaataataatgggaggaaatttatccttaataattgccacaatgggaacaaaatatgaaatagatgcaaaagataaaattttgtttattgaggaaattggagaacctcaatataaactggatagaatgttaacacaactatattcttcaggaaaacttgaggaatgtaatggtataatttttggagattttaaggattgtattgaagaaaatgatttgatggaattactaatagaatttgcaaataaggtcaataaaccttctatatataatcttcagtcaggacattgtatcccaatgataactattcctttgggcagaatgtgcgaattagatgctacagaaaaaatcgttaaattaaaaaaatagtgtgtatataaatataatagaaatatggtataatcttatacaagtaaaaatttagctaggaggatgaaaaatgtctgatgatagaataatagactttaacgaactaaagaacaaagttaaagattctgatgtagataaatttgagcaatacatatataacttatatttttctgttatggatggaaagatgtccatggctgagttttcaagaaaaatattcgattatatgagagataacaacatatctcaagaaaaatttatgaaaatacaaaagcaatttatggagagatatggtatggacactgaagaagtagaaaaacaacttagaaactttggaatcgacccttctacagcaggttttatgagtaataatacttccagcaaagtatctacagaagatttagagtcatttaagaagagtgcaggattttatgagaaatatggagaaaaaatccaaccaaagagttgtataacaacatttataaaaaatgacttaaatgatattaatgtaataatcgaccaagaaaagataatgctttgtagtgatagaaaaataaatcttatggattcagaactaaatgagtttttattagaatataagaatatgtttaataaaaaaataaaggtagtaatgtgcgaaactacgaataagtatgattattaaaaaatgaatttaaatactgaagtagtatcaattaattgtactacttaaaaataaaaatcgcaatttattattccttataaatttgtataaggaatatctaaactgcgattttttatattgtgaagattagtcataatagatagtgttttaaattgtaatcttctcactaaaactgtgtttttctattagaaattttattaaaaataaatatctgataattgtattatatgggatgtaaagtattagaggcttaacgaatctcttttaatacattaactccattttgaatcatactgttgaaaaatactaagtttaaaatctcagcagggtgaatgttaggaatatcataagtatctactaaattcataggtacaactatatttttttcaatattatgttgattaaaatatgattttagagttattgcaaattgatatatgcatatatctgtgcaatcgccaactataattatattatctatattatcaaaatccaaattttctaatgcaaaaaatccattagtagaatttttaggaagaatttgtaggttttctatcgacttaagttcatcaaccaattcactttctacatcattttccaaacagtgaacaggataactcaaaagttctattgatttaggagtatgagaatcagtaaatgctattactctatttaatttgtttgatattttttttgtaaacatttcaattggttttattaaagactctactctaggagagtataatgcaccttgtcttgcaaagccattattaacatcaattataaataaagcagttttactcaaatcataattttctattttttctattggtagattatctaaattactctttaaagcttcaagttcatttaataagttatccatagttatacctccaagataaatttaataaaattgtacatattaattatataaaagtcaaggagtacaaactattgtataattagctgtattgttttgagtgtaaaagatttgaagcaatatctggatagttagtaaaaataccatctacattgagttttagacagtgtagtatatcatcctcttcatttacagtatatacattgacaccaagtagatttttgtgacaaagttcaattagagattcatttactaaaactagaggtggatgaaggtaactattacccagaaatttagcaaaattgactacattgtttataggtaaataacacaataatcctgtttttacactagggtctaatttatgaaagttttttaagctattgctgttgaaactagatataagaactctatttttcatattatactttaaaataagctctaaaacgtctttttctatattgggatagtttattttgtcagtttttagttctatatttaaaataaggtctgtaggtgaaattagaattaatacttcttctaaagttggaattttacattctttattgttttgatatccttcaaaagatgagtttagagtttttaattttcttaaagtaaagtcttttacaaaaccatgtccattaaaagttctatcaaccttttcatcatgaataactacaatttttccatccttagttctgtggacatcaagttctattccatatatatccatatacaaacattttttaaaagctagaatagtattttctggatactttccactaaaccccctatgagcataaatattcatttatatggttccctcctataagtataacttatcttataaaaatttaattaatataatatatcatattccaaaaggtattgttatatattagttaaataactatttgtaatttatatattatataaatgtagaaaaataaaatcatatatgtgttataatatattttaaacattgtaaatattacgaatttagtagtcataataagtgtaattttatgcaagctcatgtttttagagcttgcatatgtattattaatatatttatatattgtgaaaataaaattccaaaagaattttttctatagacttagtagtaagggggaattttgatatgtatgaagttaatttagaacgagctatgaattattggatggatttgttagatgattatacgaatatagcaaaaattccaaatgattttttttataaagattgttctgatgaagtagtagatgaggtttttaagatgaatattgagaaacatgaaaggttaattcaatattctaaagtgaacaatattagcatagactctatcatagaaactatatatggccttatacttcaaaagtatatatatgaagatgatgtagtttttggtaaaacaatgaatataattccaataagagtaagagttagacaaagtgaaaaatttatagatgttgtaaggaagctaaaaaggcagtggagcaggtctttagagtatggatactatttgttatcagatatagagaataaaaatcatctaaatactaagcttataaacacaatatttatagctaaaagttttgatttatcatatgattatgacatagaaaaaaaaggatatgatttatctgtaatagtatatactaagagggcacttaaaataaaaataaagtataaaccatctatatataaaagagaaactattagaagaattttaaatcaatttgattatataatagagcaaataatagaagataatgatattttaatagaagatttagaatttgtatgtaaggaagaagaaaaagtattattggaagactttaataataatcaatatgaagtaccctatgataaaagttatgttgatttatttagggagcaagttaaggtaacacctagtaatatagctgctagggatgaaaatagaaagttaacatataaagaattggatgaggtaactgataaacttgcaggttatttaaatcatataggagtggaaagtgaagacatagtagctgtaatgttaccaagagatattaacataattattacagcaatagggattatgaaatcagggggagcattttttccaatagacacgagtaatccagaagaaagattgaattaccttcttgaagatagtaatgcaaaagtagtgataactacagatgaactcaaaagtaaggttgtaaatgagaataccatagtactcgatataaatgatgaagaaatgtttaagcttggatatgaattaactgaaaaaataacatcatcaaattgtgcatatacgatatctacttcagggtcaactggtaggccaaagaccatagctatagaacataagagtttagtaaatatgtgttattatagcgtaaaatctataagcgctacagaaaatgatatatgtggtatatacttaagtttcagttttgatgctgtaatgaaacaactattcccttatttgcttgtaggtgcatcaatagatattatgcctgaagaagctaaatttgatgaatatacagtaaatgaatactgtgaggaaaatgacataactatactagcattgccaacagcatttgcaaggttatttatacaaaattgcaataataattcacttagagttgtacagactggaggagaaagattaaaaggatatagaaagcgtaattatgaactatataatgagtatggaccaaccgaatttactgttgtatcgacttcttttcatgtggacagagaatatggaaaaataccaataggaaaacctatatttaatacttatgcatatgtattagataaaaagaacaaactatgtccaattggagcaccaggagagctatgtctatcaggcattcaaatatcaagaggatatttaaataaaaaagggctaacagagcaagtatttgtagagaatccttacaaaacttgtgaatataataagttaatgtatagaactggtgatttagtaagatggttagatgatggaaatttagattatattggaaggatggacaatcaagtaaaaattgatgagtttaggatagagctatatgagattgaaaatataataaataatattacagaaattaaaagtgttgtttgtatatcgagaacaaatgatgacggggatatgtatatatgtgcatattatgtaattgatgaggaagatagtggtaagataaatgaaagaaccattagagaatatttaaatgagcatctacctccatatatgattccaacaataataatgaggatagataaaataccagttacaccaataggaaaagtaaataaaaaagcactaccagagtgattttttattatgacaggtgttgtaaagtgattccatacatttctttatgacacctatttttctgaggaaatcaattgatgtaaaaaaaagaattttctgtatatatttactatggtgaaaatttatttataagaatgattattgtattttttatacttttccgtgttttaaagcattttttttacaaaattaattttacattaaaaattttttttattttatatcttaatagtttttagtagaattgaaaaataaaaagaaaattagcataaaaatatctaaaagtagaaattaataatatagggttaaattttagtagttttgactcgctatttgtaaaataataaaaagttaagttttatatgtatatatgttataatatatacaaattgaaaaggggtgaaaattttatgaacaaaaaattacctaagggtgcttatggtgaggttagtggaaaagattacgttccatatatcacagataagtccagaaccggtggaaatgtagctgtactgattatcggtattattttagctgccatttttgccgcatctacaacttactctggaatgaaagccggtcttacagttgctgcaggtattccaggagctataataggttctgcttttgttggagcatttgctcgttcaaagggtattcttggtaaaaacttaatccaagggatgtcaagtggtggagaatctgttgcaagtggatttattttcgtattaccagcagttatattaattggaagccaaattacattctttgaaggcctagctgttggagttggtggagttttatttggtataggaattgctgctatagttcacaactatctaatagttgaagaacatggtaaacttatgtatccagaatcaatggctatatctgagacacttgttgcttcagaggctggtggagattcaattaagtacatgggaattggatttgtaataagtggatttattactgtattaactggttcattcttaaatgtagcaaacaatgtaatgagtcttgtaggaagcaaattctacaaatggaaatttgatattgaagtaaatcctctacttttaggaattggatttatagtagggcttgaagtttctttaacaatgtttgcaggaagtattttatcaaactttggtatagcacctttaataggatactttacagatatggctaaagatggagctatggtatggaataatcctgcaatgcctcttaaccaaatggatgtcggagcaatatctagtagttatgtaaaatatataggtgctggtatgatgctttgtggaggtattattggtgcaataaaacttataccaactataatcgcttctataaaagaaacacttaaagctaaatcaagtgctggagaaggagaagaaggttcatctatacaaatgatacttttattaggtggagtagttattggatttttagcagcattcttaatttctggtaacattgttatggcaattattggagctatcatatctcttttattatctttattatttgtcatagtagctggtcgtttaacaggaacaattggaacatcaaatcttccagtttctggtatgactatagcttctctagttattgtaacattagtgtttgttataatgggatggactgatttagaagctaataaatcattacttttatttggttcatttatagttgttgctattgctatagctggaggttatactcaatctcaaaaagtaacttatattattggtggtagcaaaaacgaaatgcaacgttactttacaattgcaagtatagttggtgttatagttgttgtaggagtaattttattactttctgaccaacttagagcaactggtgataatgtacaatttgcattaccacaagcaaacttaatgtcaacattaacttctggtattatgtcaggtagtttaccttgggttatgattattgttggagtatttatggcaatagttctatatgcattaaatttaccaataatgactatagctataggattctatttaccaattgcaacaacttctataatattagttggagcattaattcgtttatttgttgaattagtatctaaaactgaaaaagaaaaagaagttaaagtttctaatggtataagtttatcttctggtcttgttgctggtggttctatcattggtttaataggtataatattacaagtaactggagttgtaactccaaaggtaccaagtggatttgctgcaacaaattcaatggcaattgctttattagtagttttagttgtgcttacaacattacctattgttttatctaaagtaaaaaataatgagcaagagtaatgatgttttagatattgtatttaaaattactgatggacttgaatatgaagtagctgaaaatagtgttgttactatacttgaaaaacaggaccataaaattcaaaagttttttagaaagttaaaagctagaatacctaaatacaaaaaaatagaactagatgaatattccagttttgtttttttacaaattgatggtcaaaggactgttagagaaataggcaagaacctagaagctaaatatggagaagaatctcatccactttatgaaaggttgttagtatttttaaatcatattgaagttaattgtcactatattgaaagactggatatatagatataataagaattattatagatatattaaagcatataaattagaaggtaattatgaaagaggctgtctcaaaatagagataagcctcttttgtattgttgaaatgatgaaaacatatttgatttctcataaaaaagagtgtctcataaaactaaaaagttcattttgagacactacctttaaaatatttataaagtatagatttaaagcaaaacttattaaacttaagattattttaatatcacttattattagctatttcatcagctagattatttaaatattcccatctttcatatttgtattcaagttccttttctagtttagatttctcatctaaaatttcttgaagtttagtaaaatcagttgaaaattttgcagtactttcatcaagtgttgcaattttagattcgagtttttctatatcagagtcaatattttcaaactccctttgttcattatatgagaacttaagctttttatcatttttaggtttttctttttttagggtagtagagtcatcttttttaactgattcccttttagattcttcaaattcaattccttgaatctctctataaataagataatcactgtaattacctgtatagatatgaatttttccattaccttcatatgcaaatattttattacaaattctatctaagaaatatctatcatgtgatactgtaactactacacctttaaattcgtctaggtattcttctaatattttaagcgtttcaatatctaaatcatttgtaggttcatctaaaagaagcacattaggagctgtcataaggattttaagaagatgtagtcttcttctttcaccaccagataatttacctatcaaagtatattgcatagtaccattaaaaaggaatctttcacacatttgagaagctgtaatcctagtaccatctgaagtttctatatagtcactagcttcttttacatagtctatagccctcatatcaatattcatatgagagtcgtcttgagaaaaacaacctattttaactgtttctccaattgaaatatatccactatcaggctctatttctccattaagtatatttataagggtagatttacccataccatttttgcctattataccaattctatctgtacgagttaaagtgtattctaaattatctataacagtattttcttcaaatgatttagatatattgtgtatttctattattttatttccaagtctacttgatgcaacagatatatcgagattttcatcaggtttaaaagaatctctattcataagttcatcaaatctttgtaaacgagctttttgtttagtgctacgagcctgagctcctcgttttacccacgcaagctctgttcttattaaattttgtcttttatcttcaatacttgcttctagcgaaagtctttccattttcttttccaaaaatattgaataattcccatcataactgaataatctacccttgtccagttcaataattctatttgtaacacggtctaaaaagtatctatcatgagttatcataagcaatgagccttttcttgaattaagatattcctcaagccaatctatagtatcattgtctagatggtttgtaggctcatctagtatcaaaaactcacaaggtgtaataagggctgatgccagagagactctctttctttgcccaccagaaagttctgctattttttgattaaagtcatttataccaagctttgtaagtactgacttagcttcactttctaaatcccaaagatttaaggcatctattttttcgtgtactgataataattttttatttaattcctctgtaaagtttgaattaagtttttctaggatttcttgatattcaccaagtagctttaattcttcagaagttccattaaatacttgttcaagtacagttgaattttcattgtaagttggattttgaggtagatattctatcctaataccattagtttttgttatattaccagtctcactttcttcaactcctgcaataattttgagtaaggtagatttaccagtaccatttacaccaataagtcctattttttccccctcatttattccaagagatatattttctagtaattttttttcagaatagcttttacttatattttccaatgtcattaaattcatataattcacctttatttctaatctattatttttcaaaatgttgataatctgggtttttccaatagccaccccaactccaacctctgcttacaaaagcattataacaatcatcacctttttttatcattccaaattttgtgctagacctatcagcataaactgtacttattttaggtgtaacatcatttccagaaacttgaggattctgtaatgggtttatatctatagcacgtcctttaccatgatttgaaactacatttgtaccagctatagttctataacaaaatgatgaggtattattatcagacatagatttttcatctacagcatcatagtcatctattaatttaattttttcaattggatattttttttcgtataattccttaaaaatatccactacttctggagctagttcactgtttactatcatttctccttgatgagttttttcatcaaatccataatatgtaagttttaaataagatagactatcaaagcttataggttcatcagtaggcatagatttaccaatcattttattttttatattatctggtattgaagaatatgaaaaagtaggcttgatattattatcttcctgctttttggtagagctttgattatttttagaatcatctgttgtattatttttattctgcatagtttcttgactctttatattaccttttttgttgggattagagaacagtatctcatatatagataataaagcaagaaataatacagttattacaatcgttaattttaatttattaatttttcttcgttttgactttttactcatattatcccccagtattagattcatataaactatatatattatacctcataaaaataaactaggctaacaatatttagttaacctagaacatttcatttatagtttctccaattatttttattccaatttcaatgtcttcaaaagacaacctagaaaatccgagtcttaaagtatcaaaaccagagttatctgtaaaaaataaatctccaggcataaatataacatttttttcataacatttttctaataaaactctagtatctatattttttagttttataaatatatgcaaacctccatcacccaagatatattctgtttttatatatttttttatacatttatatgcaaagttaaatttgtccccatagaatttacgtatttttttaatgtatttttcaaaacctccattacttaaataatcaaataaaattccttggtctaaaaaggatacatgtatgtttctgcacctttttacactttctagtttattgattacttttttatctgcaaatatccatccaattctcattccaggaaataaaatttttgaaaaactaccaatatatacgaccccattattcatattatctagggaacagataggaaatatatgagaactattgtagagtaattcttcattaaatccatcttctataattgctatattgtattttttcataagattatagaatttgtacctattttcaggagtcattacaattcctgtaggattgtgataagagggtgtaatgtatgcaaactttattttatttttatacttaactaaattgtcttctagcatattgaagtccaaaccatcttcatttatatctacacctaagatattgaggttatgagatttcataatttttatagcagtattatgagtaggattttcacatattatgtagtctttttcttgggtaaaagatgacataataatatcaaagccttctgtgaatccatttgttattagtatatctttattacttatatcagcacccttgtttgtcatatattctagtaaatagtcaataaggggcttataaccttgtgcatatccatagttgagtaatttatgtccttctagtgaaattctatttaaaaaggatttttttaattcttccatgtcgaataaatctccatctggagaaatacttttaaaggaaatcaggtcagagctccaaggaatttcactttttataatgtccaattcattggcttttttagagtatgtattctctaaacaatcccagtttaatgaccatgtagtatttgaagacttattctttgatttaacaaatgtaccttttcctgaaatagagtagattaatccttctgattttaattcttcataagttaaaactacagaatttcggctaacttgtaaaagctgactaagctcccttgtagaagggagcttactattgtctggaattagtccttttgatatcatatcacttatataatttttaagttgtatataaattggttcattatcatttagttttagatttgaaaatatcaaattaccacctcaaattatttcatctaatttaaagagtattctataagtttatctaatagttcactgtacttaatacctctagcagcagcacttctaggaattaaactagtttgagtcattccaggaagagtatttagttcaagaacatatggaataccttcacttataatcatatcaactcttacatatgctttgcaattaaaaattttccaacaagtctcagaaatttcgtttactcttttttgaagttcttcatctaagtaaacaacttcttcctttgcacctttttcaactgagtatttagcttcataatcaaagaatcctgaatcagattttatagatattgtagggaacacttctccatttaatatgaatgaagtatattctccacctggtatatatttttcaatcattacaaattcgtcaacttccagaccttttctaactgcttcttcaacttcatccttagaatgaataaagaatgtggctacacttgaacctcctgagtttggttttataaatactggataacctatattatctatttcatcatagtcgatttcatcaactgattttactaaaacccatggagcagtaggtaggtttgaatctctaagcatttttttagttatatttttatccatacacatcccactgcaaagaggtccacatccagagtatggtatatccatagtctcaagtattgattgaatacatccatcttcaccaaattttccatgtaaagcaagtattgcaaaatctatatcttctggtatctttgtaaatatatcttttttatcatctattattacttttacaacttcatatttatttttatcaaggttattatatatctcttttcctgaatttaaagaaacttctctctctgatgatattccacccattataactgctattttcatattatacactcctattttaatttttattattttaaagtaaactttttatttacatacttaattatatgaattaacagttgaggatgaaagtaccactatatacgaagtttatattatgtgtggttttagaataataatctagtttaaagatatgtttaaatgattttttaactttatttatgttattatttttgctaaaattattgttatgaacttaagactagtcttaatggctataaatcaaggagtgataaattttgaaagctgaaataataagtgtaggaacagaaatattattgggagatatagtaaatacaaattctcaatttttagctaaagaacttgcatcattgggaatagaagtataccatcagagtactgttggagataacaaacaaagacttttagaatgttttgatgaaagcttaaagagaagtgattttgtaattactacaggtggtcttgggccaactggtgatgatatgacaaaagaaactgctgcagaatactttggtcagaaattagaactacataaaccttcactagaggttttggaatctttctttgttaaaacaggaaaaaaaatggccgaaaataatatgaaacaagtgtactttccaaaagatgctatagtactaaaaaataataatggtacagctccaggggcaattttaaaaaaagatggtaaatttataatagtattgcctggacctccaagagaaatgaaagctatgtttaatgagagtgtcaaaccttacttacaacaattcacaaatgaaatgctagtatctaagactttaagattatatggaataggtgagtcaaatctagaattagaaattctcgatataattaatgagcagactaatccaacagttgctttatatgcaaaagaattagaagttacaataagaataactgcaaaggctgaaaatgaaagagaagcttttaaattaataaaaccagtagaagaaaaaataaaaagtagagttggtaaatatgtatatactgaaggagatatttccatatctgaaggggagactgctttagaagatgctgtttctaagttacttgtagaaaaaaatctaacaatagcagtggctgaatcttgtactggaggtttggtttcttcatctcttataaactatccaggaatatcttctgtatttcttgaaggatgtgtaacatattctaatgattctaaaatgaaaagattaggagtaaaaagagaaactttggaagagtttggagcagtaagtgagcaaacagctatagaaatggctgagggcgttgctaaaggacttaaagctaatataggtatatccacaactggagtagctggacctggtggaggaaccaaagagaagcctgtgggactagtttatactgcaatatatataaatggaaaaacaatagtaaagaaaaatatatttaatggggatagaagaaagataagattaagagctactagagatttacttaatgaattgagaatacaattagaaaagctttaagttgttatgatattggatatatttgaagtgttactataatataaaattgtttttggaggcttttaatttatgataaaacatatattttgtgatttagatggaactctatatgaaaatggaaccataacaaaagaagatatagtagcaattgaagaaatagaaaaaaagggagtacagtttaatgttgctacaggtagaatttttaaacaagcacataatattatcaaagatagtttagatatgaatggatattatgtatgtgaaaatggttcatttatatatgataaagattataatgtaatttttaaaagaacgatagatgataatttagtaaaaaaagtcattgatagatttgaatcaagtgatgcacaactttattttaaatataagggtgatgtaattgtgggtagtgataccactgcttttagacattattctagtgactttatagttgacccagattttgaaaaaagaagtagttttgataatcttataggaaatataggcgtatgttctgaaaatttggaagagttatccagaatagaactttatctaaaaagtgagtttagtgaagtattagaaatatatttttctggaacatatactttaaatatagttcctaaaagtgtgtcaaaaagaggaagtatagagcatgtaataaaaacgttaaatgtaagtccagatgaagttgctactattggggattctccaaatgatatttgcatgttagaaggatttaaatatagttttgcaatgtctaaggcaagggaagatgtaaagcaaagtgcaaattatgtagtagatagtgtaaaaagtgccatagatgttataatggagataaatagttagtataaaaaatgactgtcctagagaagtataaaattatattctatagagcagtcattttaattatattcaattataagtttatataaatttaaaaattcttaagttaaccgcaatttgctatatgatatgattttattgtattagataaaatagagtcaagtatataatttatgacactattacaagtataagctgaaaattttaaatcattcatataatcagttttctttttgtaatcactataaagtttagtaaaaaacttctcaaaactactatttatagtaccacatttaattttagataaatcaacatcttttgcaaatgctccaagttctctttcataagtaacatgtttatttaagctatgcttaaattcccaacgttcactgtgagctacacagaaaaaatcacataaaaaatgacatatgactcctagttcctgactaagtctacttactgaaaagtatttagaaagactatctatattaagactgcatagatagtttattttagaaacaatcatattaaatgactcatctaaataatgtttttttaatttatatttagaaaaagcatcaggctttatattgccatatataaaatttttttcgcttataaagaatgttttattttcatctatattatcaagtattgattttgccataataaaatgggtattcattaacatatttacacctcgtatagtttattagacttattaaatatattattatgatatgatatttatgataaaagtttaatggtaaatatatgaaactaagtcaacagtatttatttaaataatttcaaccatattcataataacagtaaatggccaaatttacaatatgtaaatagtgttaagtttttatttatcaaatttaaaattaagtattagtatactttctaattaacctattggctttagactgtgagatttcaaggtgtttggctactttataagaactaccaaatttttcataagcatccaaaattatatttttttcatactctttaattaaggtgtcaaaatttttatttttataattagtagattttgagtcagatataataaccttattaatttgggatatatgtgttttatttccattattggtaatatgtatattttttgtaagaatgtttggtaagtcatctattgttatatgattatctgtacaagtaagcaagattttttgaattatattttgtaattctcttatattgcctgggaatctataatttgcaatagcatccatagcttctttagaaatagttttatttaggttgaagtcacttgagtacctattaaaataatattttataatttccactagattatcccttctttctctaagaggaggcaattttatttctataacatttaatctatagtataaatcttctctaaactttttttcttttacttttgaaactaaatcagcatttgtagcagatataattcttatatcaacctttttattttttaagctcccaactggagtaaaagttctatcctgtattaattgcaaaaattttgcctgtagattttgtggtatatctcctatttcatctaaaaaaagagttcctccattagctaattctacgagcccaactttacctttagtacttgcacctgtaaaagcacctgaagtatatccaaaaagttcagattcaagaagttgtggagatatagttgcacaatttattgttataaatgggccattagatctattgctgttgtggtgtatatatctagcaagtgagctttttcctgttccagattcacccaataaaagtacacttacatccgttttagaaacatgatttactgtgtttatgattggtctcatcactattccgtccataattacagtatcttcaattctaagtgcagttctgtatagtgtttctacctcagatttatatttttttacttgcttttttgtgtcttcaagtttattttttatattattaagttcagttatatctctacaattttcaacagtaaattctaagtttccattttcatcaaatataggggtagcagttatgataagctttttccctgtttgagtatcttgttccagtgaaaatttagtctttgtttttaatacaattggtatggggctttttgttgaatatccagagtcttctaaaaaagaaacattttttcctaaaatatcttctttttttagaccataattttcttcaaatgctttattacaatatattattattcctttatcatcagaaacacatatttcatcatgggaagcttctaatattttttgataaaattccaaatctaaattcatttttatattttcctcctaaatttttaatgatatattaaaataggtttaattgattaatatacttaaaatttgatatttatataagtttcagtctattttaactttaaataagttatatataactcattttacaattaaaataagtctaaatcaacttaaagtaagcgaaaaataaatataagaaaattgaaaacttattagtattattggaaagactagggttttagagtcgatatatattggtttaagatggcataatttttgcttaaaaagaagagtgtaaattgactaaataaaaatagaagggaatttaaaatgggagaaaaaagtaaagggtatgtatttatagcaatagcagggttattatgggctacacttggattatttggaaagtttttaatgggaaatggactgacatcagaacaagtagcatttacaagattgttttttggatttatagttttaggcgtatattcatctataaggacaccacaaatcttaaagataagcaaaaaaggaattatatattcagtaataataggaattatatgtcaggcaatgtttaatttatgttattttaaagcaattgacattgcaggtgtatcaattgcagcagttttactatatacatcaccactgtttttagcaatattttcaaaagtatgttataaagaaaatattactagaagcaaattattttcacttattctttgttttattggtgcaattatggcagtgactggtggacgtttggattttcaaggtttaaacgcttttggacttttacttggggtattatcagcaatagcatatgcacttatgccaactattagtaaaaatgctttaaaggaattttcaagttcaacaatattagtatacagtttcttatttggagctatatttatgattccttcttcgagaccttgggaaatcttaaattatgctaaggatttagatgttttatcttgtatgctaatgttaggcattgttccagctgcacttgcatatattttttatgcagcaggtatatctaaaggtgtagagttgtcagttgcaggtgttgtggcatcagtagagttagttggttcagtaataattggttgcactatattaggagaaagtttttccttagggaagttatttggagtgatgttgatgttaatatctgcagtagtagcacttaatctttcttatgatgaaataagaatattttataaatccaacaagttaaagcagattgaaaaaactgaaagtatttagaattatatacttaaaaaggatttattggtatacattttagaatccaacaaaaattataccaaattatatttggtattaaaaaataactatttataaattttatagaataaagtggacagtacaaataaaatataagtagatacagtttagactatctattttttattatatattgtataaatgtacaaattaatattttgttttgtaaatactaaataactatagaaaggactatatttatataaccatttctatagttattattttgtattaaacaaacttacagccctgataagaatttctagcctttaaagtatcatcaatttgatttaaaatttcccatttttttaggctccatataggacctactagttcatccctcttaccatcaccagtgagtctatggattatcatagtttcaggaagtatttctaattggtcacagacaagattgatatattcatcttgttccataagagttaacataccattttgtaacatcttttccataggagtatcttttataacatgcaatagatggatttttataccgtctacacccattttaccaactgcctttgctgtttccatcatcatattataatcttcaccaggaagaccatttataatgtgtacgacaacctttatatttttagactttaatttttcaacaccttcaacaaatgttttataatcatgacctctatttataattttagatgtagaatcatgaattgtttgaagtccaagttcaacccataaattggttcttttatttagttcagataagtattctacaacatcatctggcaaacagtcaggtcttgtggatattgaaagacctatgacatcttcaagttctaatatagtctcatatttttcttttaaaacttcaagaggagcatacgtatttgtataggcttgaaagtagccaatatactttgcatgaggccatttttttaacatcatttcttttatattataaaattgactgataagattatctttagggtttccagcaaaatcacctgagccttctttgctacagtaggtacatccgccataaccaagacttccatcaatgtttgggcaggtaaatcctgcatttatagataccttaaaaactttttctccaaaagtatttctaagatagtaattccaagtatgatatcttttatcatcaaaagcatatttaaatttatccaaaaaaatcacctatttctaataaaattgtacgctgagcttgtacaaaaaacatattaccacaaatagataacttaaacaaattctattttaagtaatataaaaatacagcgagaaaataattaatattttctcgctgtatttccagagaaaaatagaactagtccaaataatattatgaaaaaagacattatcgatactataaatctagataaaaaaagtggagataatataaggcatataccaaatagaatcttaactatattccaagttgtaaatttagaataaggattattcttactatttacaagtgctactagttgattaaagattaaataaaaccctaaaaataatgaaaatatgctttgtattttttgaggaaatacaaaaagtaatatacatgcaattattagaacccattggatattaatagagggtttaatttcttctttagtagcatatctttttagttcattaatattttttaaatttaaatatgcaaagaataaaagtgcaataccaaaagtccaagaaattaattttatacctaatgtcttaaatgtaaggcataataatcctaagataatgagcaatactcccattaacataaatttagtagcattttcttttttattaaagttattaaaatcgatattaaaatttgtgtacataaaatcacctccaaaatcgatagaacaattataacagaaattcatatccaaataaagcctagtgtataaaaattaaactatacttagtaattaattaataggttgtatcatagacttctattaatagaattatatagaaggaggtttgtccatgacaaaattatgggcaataatatttgcattattagcaggtggttctacagctcttgaagcttttataaatggagaactaggaaaaagtacaacagcattagtggccacctttataagtttaactgtaggagcaatattttttttggcaagtataatagttacaggtgacttaaagtgtctagtatctataaatggttttaattataagttgttattaggaggagtatttggaggtttaataatatattttacagtaaaggcaattccaaatttaggagtatcaaatacacttatattaacacttgtatcccaagttttagttggattttttattgatagcgtaattttgggacaagaaacaatgcatttatacaaatacataggggttatacttttaatattagggacattctttatagtgaattaacaatttaatataatttgctatgcaactcaaaaatttggtataattatgttaataaaacaaagttagatgaaagaggtgttaaaattggctgatgaaaaatttgtaatgtcatttagtggtggtaaggatagtatattagcattaaatcgaatgttgaaaaaaggatataagcctgtggcactcttgacaactataagtgaagaacatggaaagtcatggacacataatttagaatataatatgcttaagcaagtaagtagcaatataggattacctttattagttgctgagtgtggtgtagaaggatatgaagagagctttgagagggctttaataaaagctaaaaacatgggagcaacgatatgtgcatatggagatatagatatagaaagtcatagaaaatgggatactgatagatgtgaagcagttggtatgaaagtagatttaccattatggcaagagagtagagaggatttagtatatgaatttatagacagtggattttgtagtgttgtaacaaaagtaaacttaaagcacttaggagaggaatttttaggaaaaaaattaactagagaacttgtggagaagataaaaaatgctggtgcagacccatgtggagaacatggagagtatcatacatttgtcgtagatggtccaatatttaaaaaacctgtagaatatgaagtaaaaggaactttaataaaagatggctatggatatttagaaataaaataattacataaataaaatacctattatataatcctaatttttgcaaaggtctaatatttgcaagattgtataataggtattttttatttagatattttcatatattgctactcttatcatctaagcaaccttatttagattagagtctaatgtagaaaaattcttttttagaaaaactaatgataaaataagacatataaactcagaaacaatagtagtcatccatattccttgtccaccaaatattagtatcattgaaattagacttaaaacaactattacaagccctctaccaagagatataacagtagaaattgatggtttttctactgatacaaagaatccagaaattattacattaattcctaccaataagaaagatatagagaatattttaaatacacgaactccttcattgaatagcattgtttcttctgggtgtataaataaagagactattggtcctgaaaaagccatacaaattgcaaatacagcaactgatgctattattgtggcttttatccccatttttaataatttttttacattatctatatttcctgcaccataataaaagctagtaagtggttgcataccttgagttatacccatcatagtcataagtactaatgtatttatataatttatgacactataataaataagagcattttctccaatatatttagtaagacttaagttaaaaagtaaaacaactataccacaacttaattcagtagttgaatcaggaaaacctataaatacaatttttctaagtgtcttaaaatcaattctaaattttgaaaaattcaaagtagagttttttcttaaaaaatgtattaagaagaaaatagtagaaaagacttgagacaaaacagttgcaataccagcaccttttacaccccatccaaattcaattacaaacaagtaatcaagtatgatgtttgtaagagcagatattattacaccaacagtagctaatattggaaagccatcagtttttattataacttctaaagaataagacactataaagaatccgttaaaaaatattattattcctaaataatctttaaccataccaattgtagattctgtagctcctaaaaatagtgctaatctatctaaattaaaaaaagttatagctaatataattattgataatataattattgatactaagttaaatgaaaagacttcgttagcagatttaatatcttttttccccagatagattgcaattatggtagatgcaccagttgaaaataatagagaaactgcaaatataaaattaataaaaggcattgatatattgacagcagctaaagccaattctccaactcctttacttacaaatattccatcaaccattgtatatagtgagaaaacccacattgcaactacagatggtgctaggtatttaaaaaatcttttacctagactcatgttttcgtttatagatatttttgtatccatttattatcactccctgtaaatctattataaaattacgaaactattaattaataattttatttctaatataaatgataaactatggtataataccaatgtcaacagcaaatagtatataattataaattttattaaataatagtgattttaagggtcttataaatatatcttatttatatattactgacatttaactgacaaataggaaaaaggtactttaagtgacatttaactgacaaatggaaaaaaagcactttgagtgacatttaattgacataaaactgaacattatttgaatagtattttgcttatattttcagatgtttctttatccatttcatctaataagtgagaatatcgaatatttattcatagctatttttatatctgcatgtactaatattttataaatagcttttatgttagtacctgaaagtaatatcaaagtcgcatttgcatgtattaattcatgtacttttatatctctaggattattatctcttaatagttttttaaaatgaacaacaaaagttggttgaactcacgggttgaatcttttatttaagcatatcaaatcaaattcatttttcaatataccctgtaattttaacttattttgttttaatttttgccctttaagcaaacttataagttcatcaggagcaaataattttcttttggatctagggattttagggtctttgaagattattttattgtatacataaactaatgtttgatttacatgtgagattttttatcaaggtctacatctgaccatataagtgatacagcttcaccaaaacgtaatccaagagttagtatcaaaaaaattggtatacctataggaatattttttgatttttctaataataattgagtttcttgctttgtataaaacttagaagttgaactattttttttgattggggttgtaacaaaatcacaaatattttctgatatttcttttaatctataagattctttcaatactgattttataaaatcgacttggttttttattgaatttaacatgtgctcattgtatatgttatttatataagactgtaaaatagaaggcgttatatctattaatttcatatgttattggaaaatcgaataataataacttggtattcgaaacttttgataaagtaataaaactacatccaaatgcaaaacctgtttttcatagtgatagaggttttcagtatactagtaaggtgtttgaatcgaaacttttagcacaaggtatgatacaaagtatgtcaagagctggtcgttgtattgacaatgctcctatggaaggaatttggggaattttaaaggtggaaatgtactatttaaggaaatttgatacatatgaacaattagttaaaataatagagacttatatatattactataataattttagatatcaaaagagattaaattctatgtctccacttgaatttaggaaatatttaagtacagagatagcataatttattttaagtagctctaaaaaaatttaaatatctagggttttatttgacgtgctcttttttagatagtaaactttaaaatatagatattaattatatgaatataataaaaaaagtactaatgagttacactagtactttataactacttttacatgttttaactgtataaaacagtgggtatagttcagcaggagtgactttagttttgaactaaaaatcaagttcaaaaagaataaacattagtatttgaacttcactctacgtctaaatagattgtagttcttcttgtttttattataccacaaattggtacagatattcaaaaataatatatttatgatataataaaaatgtaaatagttttgcagtgagcgatatttgttacaaagtagggcttaatgcttgaaatataaggtgttgagggtatatgataaactttatcatttgcactactcatggttcactgcaaatttaagagagttgcacatgtgtaagtattgaaaatgcccagtttattttggggtaaagttttatattaactaagtggtatggaaagaggtttttcagaagtatatgtacgtctatattgtaaagttttatattaactaagtggtatgtaaataaggaaggtggaagtcaatatgcatgggtcaaatgggttttatattaactaagtggtatgtaaatacgaaattagagtttgaaatatatgactacataatagttttatattaactaagtggtatgtaaatttgtgtcacatcattgtcacttctttagaatatcaaaagttttatattaactaagtggtatgtaaatttttaagcaggtgattaaatgattaaaaaagtagaaaagttttatattaactaagtggtatgtaaataataacttgtcaatgtagttatatgcaacaacttctatgttttatattaactaagtggtatgtaaatgaattatatattatgaaaaaatatggagtcacagagggttttatattaactaagtggtatgtaaatttgcaggttttccttatagtttgccatatgttcctggttttatattaactaagtggtatgtaaattactttagcactagtaaaggtagaattattaaagtgttttatattaactaagtggtatgtaaattcgaatgtgaatggcacttctatttctccaacttttggttttatattaactaagtggtatgtaaatagtataatgttgaaaagttagagagtacaatcaagaaattttacattaactaaaatgtatagaataaaacatgtatttatacttaaattctgtacctatataaaaaagtgaactctgtcaacaaagcacttttttatatagataaattatcattttattttaagatagaagatactaatgctaaatgtttatcattagtatctgtatgtacataaaagtttaattttttatataaatttgatctttagaaaaatgagcagtatcaataaatatattgtctaaattttttctaggaactagttgactagctataagattagcttcaactctttgattgttagactatgaaattaaatctaaaggttcattcttggtcgtataaatagctttatcattcgtatgtactataacaatttttgccatctgcttttgatagataaagagctttatcagctttagaaaataaatctttatataatttagttgaatcatcagtgaaggcaataccaatacttaatgttattttatgattgtcctttacttttattttacttgcatcatttaaaatatcattagtaatttttattattaaatcctttgttaatgattttataaatattgtaaattcatctccaccaattcgagcaactatgtctttatcatgtgtgttatgtaatagtatttttgatacagcaactaaaacttcatttccctctaaatgcccaaaagtatcatttacagttttaaaatcatcaatatcaataactaatagagcatcattatttttggaatcagaactacatagatactcttcaataagattttgtgatactctttgattatataattgtgttagtgggtcacgttgagcctgattaattaagctttctaatttagatttatcttcagttatgtcttttaaaacgcctattgttttgatagggttatggtcactatcatatataactgaacattgaacacgaatccatctccattcatttttagttaatgaatttacttgtcttatctcaattgtttcacgaagatttccatgaagtacttctagtagttttccaatatcatcaaggtgaataattttaccagattctaatagtttggagtaattttttgtttcaaaattttctaattcaatttttttgtcaatttctacacgttgatattttataagggtatcgttttcaatatcatactcaaacatgatatctgtaatattttgcaaagcaatacgatatcgctctctttctaattttagttcagattctatgttttttagttgggttatgtcagtaataatactattaatttttactatgccatcactatttaacgatttcattccagaatctaatacccacattaatgttccatctttttttcggattctatattcagatgaatatgtaggtccttttgcaaaacatcgttcacaatcttctagtgctttaggtaagtctggtggatatacagcacccactgctgaaccaccactcatttccatgaactcatcatatgtgtatcctaatattttgggcaatccctcattgacatagaaaaatgagtatgtactatcatcattgctaccttttaagccaccattgatattatttgtaatcatttcaataacttctgttttttcctttagtaatctttgcaaataatcataactttgagttccaattttagtgggaaagtattcatcaagttgcatttcaccataagggtttgatatgtgcatgtgctttactaataattttcctctatcctcaattatctcaaatgtacaacgttgatttacctctaaaatcatttgagcattttctttagttcgaacagtatatcttcctaataccatacatctattctcatcttcacttacagtttcaaatacatcattatttatatcacaagaaggaatttcatcttgacctgcataaaaataattttttatttcattaaaagaagtgagaaattcctgttctcctggtccaatccatgtaacattttcacaaaggtattttaatacttcattgatatctcgatttatataaaaacttgttataatatgttttgctaatttgggtgctttttttaggagtatgctcatgatattcctcctttctttttgctattatattttaattatattatacatcaatatatttaaattaaaagctttgttaaactatgatatctttgtcaaataagttaattttaacaaaaaagaactgaaacaatatatgcttcagtacttaatgtcaatatcttgtatagatacatatttataaactaatgtacaagtttaaaaaaagaaagataattttaatttattttaaaataacaatgttaataatcatttttatcaaattttttcttgtttttctccttgtttttatacatttttttatccaattcaactattgtcaattttaaatttctttttactgtatcaacaccataactaaatgaaagatacttatatttagagaatacttttaaaaaattttctcttaaggcttctagttgtgaataaacataatttttgtcaacatcactagagaatataacaataaattcatctcctcctaatcttataatagaagtagaatttattaattctttatttaaaagtgaaacaaaatcacataaaatcttgtctcctacattatgaccttcatagtcatttatcattttgaaattatctaagtcaattagtacaatataatctcctataaatatgtcaaatctatcatttaaatattttctattatatgctccagttaatgggtcagtaattgagtagtgaagatttctcttattttcttcatagagttttgttatatcattggccatagtaattatgtaggttttttcatcaacatctactttgtattctaaaacattccaatagcttgtagtatcttttttaaactctaaaatccaatttgaaattttatcataaggataatttttttcccaatctaattgaatattgtgagaatccgtaaaaaatttagcaatattatcagggagtttcttagctatttctatattagtcattccaagtggattatcttgcatataacttttaattaaattttttaaattatcatttataaatataattctgtagttagaatctcttataattagaaatcctggaaaagttcttaaaaaaatttctttaaacatattaatttctccaaaataaaatactttgtactagatttttgttaaattttttattttatttacatctacatacataccttgggcaatcgaccttccatcaattgcagaaaggttacattgtgtatacataactgtgacaatttgaccatctcgttttatgaatctatataaaaatggttcaattttatttgtgtcaatcatatccaaactttttttataaacaaagtctaaatcatctggatgaacaattgctcttaaatttccgcccatctcaccaaaaaactgttcttttgtataacctataatgtcaaacatttcttcattcatataagtaataatcatatcaccaaataaatcgtagcgaattatacctacaggcaacattgaataaaattgtgataaaatattactttcatcaagatgtgtatttgtcattttaggtattgaatatgattcaaattcatttatatagccagcagttttaattaaatccaaatgtaattttgctaagagtaatttattttctgaaattatacaatttgcactaaagtagaaattgctatatttttgatgttcagaagcttcatctgataaaacggcttctccactaattaataatgaatctgattcagtattatgtggggttatacttttgtaaagaatagaaaattttttacctttaatatgtttttcaaaatgttctattactttaggaaaagatgtaatttcagttttgttgtaaaaatcaaaccattgaatgtcttcagtgacattagctcttagttttttcatatcttgcataataaaaaatccatcaaatatcttctctattaaagattttcctatatcagaatattttataaacattttctctgaattattctctttagatagtaatttttcaaattctttgcactccatgggttttgcataataataaccttgggcgatatcacaatttatacttttaataaattctacatgttgttctgtttcaacaccttcacatactgtaagcatcccaagagctcttgcaatgtttattatagagtacaaaatggttgtatttttaaaatcatttaaattatgagataaaaatatcctatcaattttgattatatcaaaaggtagattttgcaacataccaaaagatgaatatccagaaccaaaatcgtccattgatacagaaaaaccataagaacgaagttcagctagttgttgaataattgtatttgtattttctattaatatattttctgttatttcaatgctaaaatttgatgtagagacgctgtacttttcagtaataccttttagcatacttggaaaattagggttaaaaaaatgaagacgagaaaagttacaacaaattggaacaaaaacatcattgttatcaatccatcttcttatatttttacagttctcttcaaataaatgcaaatctaattccgttatcagaccaaactgttcaaataaaggaataaatttatctggagtaagaagtcctttaatagggtgtctccatcttgcaagtgcctcacatccaactatagtattattttttatattataaagtggttggtaaaatacttcaatttgtttagtttgtagaacatgtgatatttctgataagaactccttatcattttctaatttattgtaaaaactattatctttaaaatcaaatagaatgtatctatttttgccttcacttttagccttttttaaagcactatatacttggttgaaaagtatcaaagtagtcatgtttggttcaccattccagatagtgctgccgatactaaatgtaacattggagtatatttctttttcattaggaagtcttatttttaattctcgggagctctctataatagttgcacccatattatttaactctttatttgatacatttggaagtacaattaaaaaaccttctccttttaaataagcgactattccctttgattctggaataaagtgcaataggttttgagttagagtaattaataaattttctccgactagatatccatatatatcattaaataatttaaagttatcgatatttaataacatgattcctatatgtatatttttcgaaatacagtcatcaatatattggtacataaattctctgtttggtattttagaaaaaaaatctatttcatttaaggtttttaatttaaaatttctactatctaattccttagataatacttctacctttttatttaacatttttatataattatgattttgcatggtattcctccataagatactttaaattttgatgacaactgtatttatgctagaagtatttaaatgttaatttgtaaataatttaaatgctaaattttaaataagtatttaaaatgaatatacattaagttatttgctccaatgctacaaatacaaatattttttagtttagtaataatattagataaaattagttaatgcttaaattatagtatattgaaagatttcctttttgaatgcaattatatcatattttttcataaatagatagattgtgagctgtatagttagtaaggtagagtttttttataattaattttaagtttaatgatttttcaaaggcataattattttattcataattaactttttatacataatttaataccacataattaattttagttattaaaattaagtttattcttgtattttttgttaaagactataataaatattcatttactaaatttataaactattaatctatagaaatcagttttaatatgaaaaatattacatagagatggatataatagctgtaaacataaaactatataaaactaaaatatatttataaaaaagttgaagttataaatactatacctaacattacaatataaaaatattttaataattaattattaggatgtttattttcctatccttgttttaaagatttttttagtatattctaatattatagtattatagagtaataatgttgatttaaaataaaaataggatttcggaggagtttattatataaatgaaagattactataaaataggagagatatctaaaatatatggaataggtagagattcattaatgtattatgaagaaataggcattctaagaccagttagagatataaatggatatagaatgtataatatatcagatatatggaaattaaatttaataaaagaatttagaagcttgaactttccaatgaagaaaataaaagaatacctagatgacagaagtatagagtctacgaaaaatattttaaatgaagaactcgatttaattgataaaaaaatagctgaatttataagccataaggaaaatattataaaaagattgagttcgattgaaagtgtaattcaaaatacaaaaatagatgagatagaggttgtatatatagaaaaaagaaaagctttagaattaaatgctgatataaagagggatgaagacttcgattttttaattcagaaacttcagaaagaatatgaagatagatttaatatacttggaaacaacaatattggttctgccttttctactgaagcaattaataaaggtatatttaatgagtttaaatctgtattttgttttctggaaagtaatgagaaagtatataatatagtttttgatgaaggatattatgtaactttaaattatactgggagtaattctaataataagatgtatatggagaaggtgtttaaatttatagaagaaaataattataagataattgctgaccctatagaaatctataagatagatatacatgagactggaattgtagaagagtttgtaacggaaattcaagttcctataactaaatagccatatttcaatggattagatggtaaatagaatgaaaaaatgttgatttgccaccgatttgctactgtgttataaaatcggtagcaaattatattttaaattataagatagcatgaaaaaataattgtttagggggttataaatgtgaaatgttctaattgtggaagtgtaaatattgaaaagggtattttaacaactggtggcatatatgctgaaactattggattaaaatatagaggagatggaaaattagataaagttataaataaaacttttccagtacaatctactatatattcagatttatgtttagattgtggcgaaatagttagaacctatataaaggataatactgataggaattggtgtaaagataagaaatagaataatttttgaagtatattaatatttgaagttgaattttattaaagatacaagtgaaaaagtataaatgggaagaaattgttatatggaagaaaactttgcatataggggagattagttttttaatataataacatttttaaatgtagataaaactaaaaagggttctctagaaaacaatttctatttaattatacttacttaccaataccatcacttgatgtaaacaagattctactacattttctccgtactctagtataaaatcatctagctgtgtatctataaaatcacaataatcatataaactactaatataagcagttaacatgtgtgtacatttatccatttcatctctaaacatatatattactatccccctaaaaaactttcataaaacaaaaagaacaatatctttttggcaactggctgacataactcatagtttattttataagcgttagtccctatagctttgcgtcactaaatttctctagttttgccgatttagttttattctacaactaaaataatacactaggataagttattgttcaacatacttgtcagaaaattgaaatatttaacagtatcttaacaatatgaaatctatttttcactcaagaaacaaactatacatgtagaatatttaataaaaattatatttagttttgtattgaagtttttgtattaaaaagtttagttcacaagagttacttggctagataatagatgagcaaaaatatcttgaaaaaatatatatgaatggcaaaaaacaagggatgaattttatatagactcatcccgtaattatttatatattgaccttgattaaatatattattatttttaagcttcaatttttatattatatttctaaagtttctataagaggattatcgctaaataattttaataaatttgtttttttatatcctttaggtaacttagtatatataactacttctaaccaatccccatcaaggcgtttaatattcatgtttataatttcaatattagattttttaaatttaccttcaatatattctatggaatcagtgctgttagaaattttaagagaaacttgctctgctgtagggagtttcatccacttcctatctctatgaagtgttatctgtacaataacaataatgatacttgaaacaataccaactaagtataatccagagccaatggcaagacctgtaccggctgttgcccatataccagcagctgtagtaagaccacttactgattgatttctaataaatattaatccagcacctaaaaaacctataccactgacaacttgtgctgcaacgcgggctgggtctagaccaatacctggagtacccactatatcattaaatccatacttggaaacaatgattataagtgctgaagctaatgccactataaaatgagtgcgtattccagcttcttttagtctattctttctctcatatccaattaaagccccacagaaaccagcagtaatgattcttgctatatattcaaattgaatcaatatatgatggttcatttatctagcacccccttctatataatattatatatactataatactacattttttatgtgaatatagtaaagtttaaaatttatataatagttatatatgaatataaaatgtataaacgtatattatgtatataaaaatgatagaaagcatctaattttaaatgattaaagagcaagcttaaataaatcaaacttgctcttttaacatagtgtatgtttttatttgtgatagttagataaaaatttatctgtgttttttacatctgcaaaactgttctgtagtgatgccatgaatacttgatgtacagtatttgcattaatttctatattattccaagataaattcttcgttgtacatgcatcgcttattagagttatgtcgtatcgaagtttctttgctgttcttacacttgtatcaatacacatatggctcatcattccacagattactagattagtaatattttttttctcaaggatactttgcaaatctgtttcaaagaaactatctggtgtgtgtttaattataatttcttcattatctagtggaaaaacaattttatttatttctgaaccatgagtattaggaagaaaaaaagaagctgttttatctgttgatatatgctgtatatgaataactggtaaattgttttttctaaaaaacagtagtatttttttagcattttcagcagtttcttctgattgaaataattcacattttccatttttaaaataatcattttgaatatcaatcaatattaaagctatagacatgattataccttctatttacttttattataatactattgtaaaaaatgtaaattacttactttttggtatgtataggattacttattgtagcaaattcctttattatctagaatttcttgttgaccatgttcaagcatatattcgattcctatttcttgcattatttccactgcttttaacatttttttaccacgattagtaagaaaatattcaacatgtaatggatatccagcagaacttattttatcaataatcccaaaatcacgtaactcttttaattgttgaatcaacattttttgatttattccataaatattatgttgcaattcagaaaatgttttattagattgtcttaattcaaatataaggatagttttccattttcctttgattatgtcatgtacaatttcaagaggacatgtatattcagctcttattttcatagcatatcacccccagtaaaatgataataaattatatcacttgtcttgtgatatgacaaatatatatgaactgtatataaattttatgttttattaagttctaaatttcttctattgtagttcatatttagtacataaataattagtaagatataagtaaataaatatataacatgactatagaaatttaactttaaaataacttatgataatttagaggaggaatatatatgaatatatcaagaaaagctatgaaaataatagaattagcacaaaaaattgcaaataagagaggtatttcagtagaagaagcttggagtgaagcagtaacagaatataaaaataaatacgaacatattgcatagatatttaaaaatttagaatatttggtagaatataatgattttaaatgatactataaattataaggtatatcattattaacatagaaggaggatatctgcttgattgtaaaaatagataatactttagaaaaagaattttggcaatatgtatcacatgaagaaagtttaaatttattcataattggatacgttgagaattatggatttagctctcaatatcaagatatatggtctcaggtagaagatggaaatataacctctataatattaaaaaataagtcaacacttataatttatagttttaaaaataattttgatataggagaaatgaagaatcatataaaagatttagatgtagaaagcataagtggaaaaaaatgtgtaatagatagactaataagtaaatacaaagatttttatgaaaaactagataataaattttgtgtattaaaagaaataaaagaaatagatttttccaacatgaaggagtataaaatagaaaatgctcaggaaaaagatattgatgaaataggaaaacttttaaataggtcagactataaagtaagtaaaaattacatagaagaaaggaaagaacatttaaaagagggaaatgtaagagcatattttattagaaatgatgatactatgattagcactgtgtcaactggtatggaaactagttttttggcaatggtggtctctgtaagtacagataaaagatataggggaaaaggacttgcaagttatatggtttacaatttgagtaaagaattattgttggaaggaaaagttccatgtcttttttataataatgatgtagcaggtaaaatatatcataatataggatacaaagagataaatgaatggacaattctttttaaatagctataaaaataataaattttcgtgtaattcttaacgtgtattgtataatcgctcaaatacttgaaaggtgtctagtagatgggtttgttagcatttatggtctccttatctaagtaaagttccctttggaaatcggtgaaatactcttttacatttcatgagtcctataaaatctatgacataagaaagacccagttacattgagtaattgggtcttattatcatatatattgtgtgcttacatgatatagttcatttctataaacgtagtatttcgtaagtgggaaccaattttttaacaagtgattatttgaacaaagcaataaggatatgctagcagatggattttgtataatttaaaaatcaatatttagactctatcatgtattttcatcatcataatccaatttgaaattgtatctaaaaccagtttgctatttccacagttacagtggttactagcttgttctgcttctgtcataagcctaaatgtaagggatcggacattgttgagtaaatcaatctctttaccaacagttctataatcaataaaatgatcttgtgttgcacctaaaatcaaaatgtcttggtttatattttttgcaatagaatctatttgataatacttgattttctgaaaatattcatagggtgtagacgcttcatatgcgtacattccatgttttaaaccccataccaccatactatcgccacttttcattttttgctttattataaaattgactagccattttgttttgagttttagcagtagtctaagtagattttgcatttttattggttgtgaaccaactattatgtctaagaaattggggaatacagaccaagctaccacgcgttcaattcgtttttcgaaggctgctgctcgtggagcaagaaaacctcccaaggaagcacctacaatagttatattctctaaatgaaaataatctaaaattgtcttaacgggacgttcccattgataagtaaagtgttttccctgcaaacgcatcactccaccttgaccaggtccctcaaaaagataaatatcaaatccctgtgacgcaagataaagcattgggaaaaagaattcttcaaagtaagaatcatttccaccgtggagcaatataacatcttttacctcgccttgcgcttttgcatacattacaggtagggtgatattttcatatggtacatgaaaaatttgtacagttccatttgagaaatattcagagtagtagttgtagaatagagtagttgcttttttgtagactgatattttatcagggtcaccatcatacataaaaaattcactcatacgatagtaagcaattgcattttctgtgcgtccatcttgttcagcttcttgtgccagatacataagttctgttttccaactttcgctatcgacaattttagaggaaactttttgtatatcttccaagcgccccccatcccacataataatcctgtttaactgaaaattaaaattggcatttgtattaaggtaatatagacctttattaaaagaaattttatttgttttcaatgtcatcactcctaaaaagataatgcatagcaataaagagtaatctttaatgctatgcatttattgtaacaaatattagaagtactgactttcaaatagacgctattggcggataaaatatattttacattttcctataagctcacttgcagtaatgccaagatattttttgctggaagctgagaaatgagacggtgaactaaaccctgcgtccatagcagctgaggtaatatctccactttttaacaataactcataagccttgcgaagttttgataaagccaaatagctgtttagtgatactcccatttgttctttgaaaagatgagaaaaccggcttttggacaattttacttcggcacatatctcaaaaaagatttcattgtgaatgtgtgtggactttagaatatgattcaatgcccattgtattctactgtctgtaatagacgaaatatgataatttaaattcaatagacggaaagcttgttttgaaaaatcaatatagctttgggacaatccttttacctgacaagctgtataaatattttgtattcgttcaactataagattatctataacgaaaaaagagtgatttagtaattggtgttgactaatattttgggcgagtatgcttgtatcatctatcaagaaaaccaacattttattatctttacttgacaccgtatgcgatacattggaatcaataataattcctttacattgtaatgattcgcccttatcaaacgtcacagataagttaccagactgtgatataataatatgttttgcaagatgtttatggatagttggttgtctatactctgtatctaaaaatatatggtcaatcattacacaaatggtagtcatagctgtcaactccttgttcatagcttagcatattatacagtttttaacaagaaagcttagtgattacaagtatttaaaaatcctattttaggcaatgaaaaataaaaaactctatcgagaattaaagtatttataaataactatatttttactatgattcatgatagagttttttaaaatttatgatactattttttattatttaaataatcaagtgttttaagtttataaccttctttttcccaatgtgtaagaacctcatctaatatctcagtatttgttgatgaatttggatgcagtaaaactattgcaccaggatgagttcttgaataaattttgtttttggcaaattcatgagtaggttgtttcttttcataccaatctacataagcaaaactccaaaatattgatttatatcctaaatcttgtgtatattttaaagattgttcgctaaatttacccattggaggtctaaaatacttaggcatttcttttccagtaacatctttgtatgctttttctacacttgtaatttcttctttgaatttttcaaaatctgtaatacctgccattgatggatggctttttgaatgattacaaactaaatgtccttctttttccatacgctttattaactctggattgctttttatataactttcaactacgaaaaattgagctttagcattgtgttttttaagcgtatctaataattttggagtgtttccactttcatatccagcatcaaatgatagatatataactttttcattgggatttcctacataataagctccgtattttttaaaaaaatcagcttcttttataggtgatggctgtttaccatcctccctagggttaaaataccaatcatattcatgtgtgtcgagtgttggactagaaatttgagtttttgttttatctaatgatttaaaatttatactagcaattccaaaaagtattagagcaaatgctcctatcataatgtatttttttaggctatcttttttcacaatttcacctcttatttaaaatttaaagtatatttcttataatatagtttgaatatttatagttaaaaatattcacatatacaaataataaatgaaagaagtttactgtaagatataaagttgatattaattatcttaaataaagtgtatataaatgataaaatataaagagaaatgattgtaaataagttaggctggtttaacttgaagggatataaaaatggataatataataagtgtattgaatgatgttgtttttttagatatagaagttagtggattagattgtttaaattcagaaattttagaagttggagctgtcaaggttaaagactggaaaatatatacctatgaatcattaataaaaaacaaatttgaggtacctatagaagtattctcagtatgtaaaaatttagataaaaatgatttagaaatagctaatgaaatagaactggtggaagatagacttgtaaattttgtagaagatagtttcattatatgtcatgatttaagtctgaaaaaaaagttttttgagtatcatatgccaaagttaaaaaacaaatttattgatttaattgaattagcagttattttagaaccatatcataaagattatagcttagaatacttaaaaaatactttaacaaattgtaattctaaagtggaaaatagagctttatcagatgctattgatataataaatattgtaaattgccttttagtaaaatttaataactatgaaaaaactactttggagccattgagttttaaaataaattcatatcttaaaaaatttaatcttccaacatgggaatggagcaaatttttagaagaggcaaattatgatttatcaaataatataaatataaaaaaagaatataatatatttgactcaaaagaagaaaagaagaaggaaagagaaaccttaaaaattttaaatgaagaagaaaaaaattatgaagaattattaaaatacaaaactatttgggagaataaagaaggatttacatatgaatatagacctggtcaatatgagcttactaaaacaataagagagttgtttagaaatagcgaagatgaagaaaaaattgcatgtatagaggcaccaactggtataggtaaaagtgtaggatatttattgcctgcaatattagaggctagaattaataaaaaaagattattaatttctactgacacaaaggaattgcagatacaattaataaataaagatattccaaatgtgttagattctttgggtctaaatggaaaagtaagttacggatatataaagggaaaaaataactatatttgtatagatagactggaagcatatatagatgattatgagtctcaaaaccctactaaaggagaaattttatctttaatatttttgaagagattagttgaaggtggcaagtatggagatatagaagaaataaattatttagtgtttgacaacttcaaggaaataagtacccacttaagaaatgtaagttgtgacccaaatatgtgcagacctaaaaaatgcaaaaaagattgtttatataaaaacagaatagaagaattaaaagaagaacatataacagtagtaaatcattcactattagctaaatggccgtataaggatgaaaaacctttagaaaatataatagtagatgaagcacataatttgactgaaaaaggatatgatttcttttcaagcattataaattcaaagtctttaaggtatttattacaagaaatttatccttacgagtttattcaaaatagtagctttatatataaaaaatatagtagaaatatgagaaaaataaaggcttttgataaattttataatgtattaaaaattggaagagaagataaacaaaaaattgctagaagtataaatctcattattgaagagatagattcaatattaaagtttggtaattgtaatgaatataataatgtaagtaattataatttaagatgggaactgaatttgcaaatagatgaaattgtgggaaaactaaaaaaggatggtatagatactgaaataagttatagagcctatagtgaaaagataaagttgagttgtgagaaaataataaaaaatttagtttcaataataataataatttataggaatattgatgatgatagtatagataaagaagcagatatatataaatttggaaaggcaaagacaagagatttagaggatataaagattatatttgaaatctttttagagtatgatgaaaaggatgattatgcaaggatagttgaaattgataagaattataatgactttgaatttcgagtagtaccattaaaaatagcagatttatttgaagaaaatattttatctcaattagaaaaaggaatatttttatcagcaactttgagtttatctgaaagtatgtcttattttaaaaatacattaggaatagacagagttaagaatgtggaaaagattatagaaccaatttttgattataaaaatagagtctctgtagttggattttctgatatttgtgagtacagaaattctgaatttccaaatgagatgagtaaaattatatctaatatatcaaagattacagaaggtcatacattagctctttttaatagtaaagatagacaagaaaaaacttatgaaatattgaaaaaatacttacatagttttaacttagaaatttatgctgataaaaaggggattagacaccttaacgatttaaatagaaaatgtgtagtacttggctcaaaaggatgttttgaaggcgtagacattccaggggatggtttggtttgtgtaactttagacaagcttccgaatctaaatccaaaagaccctttgtattttactataatgaagaagtatggtatagactactatactataaattatcctcaaatgaccataaaggtaaagcaagctatggggagaattttaagaagcaaatatgactatggatgttttgtgatttttgatgtaggaactaatataagtgttttaaagagattagagaaagatttacacgattgtaaaatttcaaaggttaatagcaatgagttttatacttatataaggcgacatttaaataaatctagaagtttaatactaaaatctgttatatttgatactataaaagcgttgaatgttgatgctaaaatggataacaatgatgttgataaagatattataaaaaaagatataaatgaaaatataagacaaagagctgtaaaaggagaagtgtaccatattgatattataaaaaaagatatgaaagtaaaatattttgatagaaactatcttataaatttagatatatttatgagagaagaagataaaaattaagagtgggagtgagatatttggcaaaacaaaagttttatgctgtgaaaaaaggtaaaaatataggtgtatataatacatgggatgagtgcaaaaaacaagtaaatggattctcaggagctgaatataagagtttttctacttttcaagaagctaaagaatatattgatgggtcagaaaaattgagttttcaagaagataaggagtttatagaagcatatgtagatggaagttatgaacattcagtaaaaatgtatggttcgggtgttgtgattttaaaaaataatgaagttataaaaacttatagtgaaaaaggaaaagagaaaactttagtaagtatgagaaatgtagctggagagatagaggcttctaaaattgcaatgcagtactgtattgacaataatgttcaaaacttgattttatactttgactatgaagggattgaaaagtggtgtactggagtttggaaaacaaataaagaaggaactatagcatataaaaatttctatgacagtattaagaataagcttaatgtaaaatttacaaaggttaaagctcattctggaaataagtataatgaggaagctgataaattagctaaaaaagctattggtgtataataaaaaaatatttatacataattacatggtataagagtatatctaaattcctactttataattaaacaacttgtaattaaacaacttgtaattaaacaacttataattaaataaattttgattaaaaaagcagattgtattatgaaaaaataagtatctaatttataaacaattaataatagtattaattagatacaacttatttaatataataaaatctgctttttatataactataaaatcttcctacattctattagaattgcccataaataccttcaagttcttcttttaatacttcagggtcatttataccaatagacatggttctagccagtatatttgcttggtcataagttgatgtccatgagaatacaccacctagacaatttctaagaacatattgagtttttaagaatattgataaagcatcatcatatgacattgcaaaatctccatccttaactaaatacggaacttgagcagtattatcaaatctatattcatatccatttttatttatataatcccttctaagctcatcataagttcttgttatagtggcacctaatcttccataaaatggtataccgagaaggattttttcagaaggcattccagcattctcaagatttctcaccattgcatcaacactatatcctggcaaagataagtctgaatcaaaaagatttgcttgatgttttctaccatttgggcctgtttcacctgctgtaaaatcataactcataagattaaaataatctattataggagctattttatctatttcagcacttgaatttatatatcctctatctcctgttccagctacactaagccatttatcatctcctataacatctcttatggcagttagtaagagtgtaaagttttctctatcttgaggtcttgatgttattccagatgcactacttccaggatattcccagtctatatctattccatctaaagcatattcatttatcatctgattgacctgtcttgcaaaattatatctagatgtaggtgttaatgctgcatcagagaatccttcagctccccaacctccaatagctacaattacttttaagctaggtttttcacctttaagagcaagtaattgatttaaaaatctaggataaggaataaacaaatttccagactggtctatctcagcaaaagcaaatataactgcatctaatagttgagcatctacattagttggatttccaagaacatattctgctacaattggatttatatctggacagtttgcattttcaactattggattgtatgggtctgttatttgtggtctaactaatttttttgaatcttttaaagttttcatagctatttttttagtatttttttcgctagtataatcgtagtttttataattatgtttatagaaatcttcataactactatcttctttgttatagctagaatttattttgtcgcaagattcatctttatcatagttaaaattcatttcatcacaagacttatctttaaacttatcttgtttggagttgtgaactttgttagtatttttagtatgttttttctcatggttgcaatcatctttaatatcagtcttgtgttcttgtttacagtcaagagctttgttcaggtagtcatgatgttcatgttcacagttacattcattttcaatgtttttagtatgttcttttttccagctacaagtattatcaattttcttgctcacttcttcatcattataattatctggtacaaaacataagtaccagtccatacatgaatatttcttattacaactgttaactctattttttaattccttatagtttttaggataaggtaaaatcactggcattccaggaaaccagtttgcaggagtaactatattatctctatcactagtctgaagtgcatctactattctaagtatttctggaatatttcttcctgtagttagtggataataaagaatcgttcttagaatttgattattatctataataaatacagagcgaacagttgatgtatcactcattggttttgatatcatgccgtataacttggcaattctcatatctctatcttctataataggaaatggaatttctacacctgtaagtaaagaaatattatacatccaagctaaatgtgaactgttactatcaacacttagaccaattagttctgtatttctttttttaaattcgtcataatatttagcaaaacataaaaattctgtagtacaaactggtgtaaaatcaccaggatgtgaaaataaaacaatccaattacccttatagtcagagagtctaataggaccatttgttgtattggctttaaaatcaggagcctttgaccctaaacttggcaaatttggcatgtaaatcacccctcaataaattatcatttattttattctattaattaatacatattagtgttactattttattaaaagttaagtaatccttatgtcaaaaaaagatatttattaaaaagatttaatattttcctaatataaatgacaatagtaattgctatttttttactaatttggtatagtaatggataaggggtagtgtcaattttagtgattatacgaggtgattggattgaaaaaaattctaagaattttagttatctccatgatgatatgttttgcaatgacttttgcattagtgttaataaattcagttatgggagtacatataggattggattattactttttgatgggaagtgtgcttacagtttgtttaacaattggaattgttttatgcaatgctagaaaaatatttgatagcaaagctatacacaagacaagaacgaaaactgtcagtactaataaaaaacaaaagagtcattctagggatataaaaagaaagatatcataatttatgtaaaggaaatatttatgtataaaataatgattgataggtaaaataaaaacacgatttaacttgtgtttttattttttttcaagaattatgatataataaccaataagaaatttagtttaccataaaatataaagattattaaatggagagggaactataatgaattttagagatttatttgagaaggctgtagattttattgatgaaaaaaggaaatctatagttgcgatttcattatcaacattaggtgtaattgctttgataatagtatttttcttaagtagtaacgagtttagtgtaggaaatgaagctaatgagttgttaaagattatagagaaaagacagtattctatagctgttgattactacacaagtatagaaaaaaagttttctgattcaaaaatggaaaggtttaataagtctgtttctaaaaaaataaataaattgctattaaatagtggtgataaatatttagatggagacataagtcaagaaagttttattggattaataaatactgtgaaagaattaaacaaaataagtatagatgtggatgacttattagctcaagctgatagagttagagaaatgtataaagaagaaaatactacttatgatattgccattaactacataagtactgtttcaatattaaatggtatgggtagtaacctagatgtatacaaacagaatatagaaacaatcaaagagtctagagatgtttatgactcagcagtaaaagaccaaaaagcatataagtattatgaagctattgaaaagtataataaagtattaaaagaagatgaaaagtattacagtatggctcaaaatgggaaagaacaatgtattgaagaaatgtatgattactatataagtagagctgaagaggcaaatacttctggagattatgaaagagcattacaatatattgagtatttaaaagaagattattcagatgatgaaaaggtacagagtttagaaaaaaaatataaaaagaatttatcattgtataccttaacatctgatgacattataaatgtaatagctaaaaaaagtggcaaagacaaggcaaatctatctataaattcacttccacaaatgataaaaaataataaatactattatgctgaagtatatgagtatgataaattaataaatgaagttttggtaagtgcaaaaactaaagatttatattcgtataaagatggtaaaaaagattacaaagtagattatggtgatggatactttagaatattagaagatggaagttatcaatttggtattacaaaagataaagctaagtttgtgttaactaatactcttgatgaaaaagaaaataagtataaaaagattgagatattagatatagagaaagcagatagatatgtaaaaagtaaaaagagtttagaagaattgtttggaaaatataaaaatatttattattatgctgtagtaaataaaggcttatttagaggcaaagaagtttatgctattaatatttacaatgaaaaaatatatgccatatcagaaaatggactaaatgaatattaattaataatattaaattaatatataattaaaaagtttttggggttttaaggcgcattatgtagtaatataataatagggatatataaataattttattgtaaggagaagtatgggatgagtaatgtgaacaaaaagctagttatagctattggagctgtagcattagtagcaataatttttataggcataatgtgcatgcaatttaaaggggagaaaatagcaaaaaacacatatgttaatggagtagatattggaaaattaactaaatcgcaagcaaaacaggaattagctaaaaaatacaaattagagaatgttgagtttaattacaatgataaaagttggaaagtaaagagcaaagatttaaatttatctactgatctggataaaacagtagaaaacgcatataatttaaatagaaagagtagtttctttggcaatctatcaaaaactatttcaacaaattttggcaaaaaaagcaacttagtagttgtgataaattatgataaaaataaattaaaagcagaaatggaaaaaatagctaaagaaatagatgtagatgtaaaagatgctacacttgatataagtggtgaaaaagtcaaggttataccagattctgatggtcttaaaatggatatttctaagagtatggagaattttgataatcaaactaaaaaaggtaactataaaaatgagttagtagtaaaagctactccagcaaaagtaaaaaaagagcaacttactaatatagatacaaatttaggtacgtattcaacaatatttaaaacttctcaaataaatagaagtataaacataaaattagcaacagataatataagtaatgtattacttatgccaggagaaactttctcatttaataaacatacagggaaaagaagtaaggaaaatggatataaaagtgcacctgtaataatggaaggtgagatggaagaagattatggtggaggagtttgtcaagtttcatctacgttatacaattctgtgttatacgcaggtttagaaattgttaatgtaaaaaatcatactataccatcaagttatgttccaaaaggaagagatgcaactgttgcagatagtggaatagatttcttatttaaaaataatctaaagcatccagtttacataaaaaattacgtttcaggaaatcaaattgtttgcaatatatatggaagtgcagaagataaacaaaatataacgatatcaacaaaattagatggcgtttcacaaactacaatgaaaagagttaatgaccctacaatgcctaaaggtaaagaaaaagtagacaaaagtggaagaaatgcatattctgtatcaacatatagaacatttaatgatgcaaatggtaaaaaaattaaaactgaaaaaatagctaattcatattatcctaagaaggaaggtattatattagttgggactatggaaccaaaaccagaggaaaaaccaaatacagacgaaaataagaataatcaaaatacaaacaatcaaaatccaaataatcaacaaaaaccagaaacaccaccaactgataataagcctaatgagacacaaccacaaccgcaagcttaaagttctcaagaataggatttatgtagagtaataaaaaatataaatctaaataggagggattactttgaatttaaataatataacgaattacgttcaaagtatttgcgagaatatttctaatgtattggatgtagatgttactttagttacaaaagatttaactaggatagcaggtacaggaatattcagaggtaaaataggagagacaatatcagagaagtcagtgtactctcttgttttaaaagatggaaaatcctatgttataaataaggaaatagaagagaactgtaataaatgtgcaaatagagaaaattgtaaagaattagctgatatatgtactcctgttaaaatgggagaacatatacttggaatcttgggtatagctgcgtttaatgaagagcaaaaagaaaagatactttcaaaagataaggagttaactgcttttgtaaggagtatgtctgatttaatatcttttaaactagatgaactttataaacaagaagttaagactatagatgaccttgagagggaagctatagaaaatgccataaagaaatatggaagtaatacagaaggtatgaaaaaagtagctgaggcattaaatataggtatagctacactctatagaaaagtaaaaaaattcaacattaaaagttaatagtattgaaaaagaggtaacctttttatgaaaagaagaggattaccttttttattatgagaatggtggaaaaatatgtatagttttgacttgacatattaaatatgttatcttaaatatatattttagagtggaggtgagtattattttagttaaagatataaaacaagacatagaaagcatgcctagaaaaattttagatatatctttgatagaagataataaaagtgatttgactttttttaatatagaagaagaagacggtgatgaaacattaaaagcattaaaacagagttatgtgactacaaattataaagaagaaactctattaaacttgcaaggagctttaaattcaaagtcagacacaacgtctaaggagttaaaattagaatcatataaaagatataacaatgcattggatttagcatataaaaattatataactagtgccattaatatggttaataaagctctggagataaatcctaaagatattgatatactaaatcttagaggtcttttaaagttattaaaatgtgattttgctaaatcatttgagagtttttatactgctttatgttatgagaataatcatatatctagaaaatatgtaaatctaatttcatctgaagattttaaaacttttttaggaagatacaatcattctataagatttataaatgaagaattaaattatgagtcaatacatattttagagaacataattgaagaagagcctgagctaatagagccatatgtaatcttatctttgttatatgataaactaggtaatgtaaaaaagagagaaggatatttagacaaacttaaagagctagataaagataatcctgtatttgaaaaaaatgaagaagaaaaagaagatacaagtaaaaaggaagaaataagaaaagtaaaaagaaagaaaagtattttaccatatattatagttggctgtgttttaataggtatggggatatatttgattcaaagcaaaaagagaatagaaaacttgaataaccaaataagtagtaaagaggaaaagttaagtgaaactgataaaaagttaggagaaacgagtaaaaaattagaaaaaacgaataaggaattaaatgaggttaaaaataaagaaccagaaagagagataactgtagctgatgaggaagatttatattatcaagctctaaatttaaagaaaaacaaagaatatgaaaaagccatagataattttaaaagtgtagtttcttctggtaaaactaaaaaatatatttctgagtcaatatatcaattagcaataacaaataaattattaggaaataaggatgaagctataaaatattacaaaaaatatataaatacttatactaaaaatgaccagtattatgatgattcatattacgagttgggtatgctttattatgataatggcgatttaaaaaatgcacaacagactttttatagtttgagaagtgaagttccagacagtatgtataacaattcaaaaataaaagaaatcttaagtgaaaaataggtttatatagttaagttttttgaaacaaccaagtatgtattttattaaattaaaataaaaataaatttaaaaagagattgtgtcaaattataactttctattttaaagaaagatatttgcttgttgataaaactacaaatatatgatttgaagcaatctctttaatttttggaggtggaaaatgaaagttttcaatcaattagtaataattttatctatctgggtaataggagagtatataagttcctttatacaaggaattatacttattcctgggagtatagttggtatgctattattatttctactactacaatttaaagttttagacttgagtagtatagaaaatgtaagtggatttttcctcgataatatggctatattttttattccagcaggtgtatcacttataaagtcattagacctaataagggaaaatgtattagtgcttttattagtcatatgtttaagtacactaatagtaatgtatactactggaattattgtggagaaaatgataaaaaagaaggaagaaggacaaaaaaatgtataatgtattacagacaccagtatttggtataatagtaacaatagtttttttcaatttaggaagatacattcaacgaaaaacaagtaatcctatatgtaaccctttattaattgcaatcgtaggaataatattgtttttaagcatatctaaaatcccttatgagaattacaagataggagctgatagtctaaatttctttttaggtcctgtcacagtagtacttgcagttccactttataaacaatttgaattatttaaaaagcatatgtttgagattattgtaggaataggttgtggtatagtgatttcttttgtatctgtattgataattggcaaaatagctaattcagatgtaagtataataaattcactaattccaaaatctataacaacaccaatgggaatatctttagcaaattctttaaatggtatagaatcaataacagttgtagccataatttttacaggtatttttggtggtatggttgcttctacagtattcaaactggggaatataaatcatccagttgctaaaggaattgctcttggaacatctgcacatgctttaggaactacaaaagcttttgaacttggagaaatagaaggagctatgagtggtgtttctattggagtttctggtacaattacagtaatactaattccaattataatgaattttatataaaaaataaaattaagacgagtaccttgaatacttaaaacaaaataaaataaaaaaaatttaaaataaaaactgaacgaaaaaaatgcaaataatgaaataaaaaaatcatgtactgaaattataaaaagaaaaatttcatttaggaattaattataaagagataattactaaacttgaatttgctaaaataaaataaattactgcgaaaatagatatttagaaaaaaatactataaatttactatattgcaagttaaataataagcagtatcatattatgctagaaaaagtttcatttaaggcataaatgagatgatttgaacgtttttaaagattagaatataaaagattgcactagacatatatgaaaaagataatataatagatgatgtaatagatgacagttcaagaaattataaaaaaaatttatttgaaatattatctattacatcaggaataatatatgtaagagtaagcttttaaaattctaaagatttagaaagattgaagggagaaagaaatgagtgaagttaagaataccctacaaaaacatccagttttaagatattcaacaatgctatttgggatgttgatgacatctataggaataaatgggttcttaagaccagcacatctgcttagtggaggtgctacaggtatagcaacatctataaactatttgacaaatataaatgtaggtttattaacatttttaatcaatattccaatatttatcttagggttcatataccttgaaaaagagttttgtatttcaagtttggtaaatatgattgtattttcattattattaggagcaactcaggaaataagtaatattatacctatacatgatatattgcttcaaagtgtatatggtggtatattatctggtttaggagtcggagttgtatttagaactaggtcttctcaaggtggtacagatataatagctgcaatactaaaaattaagaagaatatagaaatgaaagacactgctttagcaataaatggcttgatagtacttacaggaagttttttatttgggttggatttagcattatacactcttataggtctatttctaaatgcgtattcaatgagttttattaaagatgcaatgaattaccaaaaatctgttatggtaatgtcaaatgaagtcgatttaatagcagaagatataatgaagagtttagttagaggtgtaacttttttagatgcagaaggtgcatacactcatcaaaaaaagaagattatatatacaatagtttcatcaaatgagataccaaagataaaagatatagctttgaagtatgataaaaaggcctttatatctgtaaatgatgttacagaagtaaaaggaagagggtttaaagcaaaagatttatagaaaattttacaagctgggagtttataatgtaaatttgtatattatatctctcagcttatttaaatttagtatatgaaaataaaggttttatcaatgatttgtgtatcactttaaaagatatcattttaaaattaaaattgaaaaaattactcaatatgtagaaaacataaccactattaggatataataaatttaatagatttagtaaaatatctaggaataacgttggaggaatagcattatgaatttatctaaagaatatgttaatttgtatgataattatttgaaatatataaatgaagtaaacaaagagattagaagtataaagaacatgaagaaacgtgttttaaaaaagggcgattttgctccagaaaatgaagtattagaattggaaggaaaaacaatacgcgatatagatgatgtcgatacaaaaaaaccaaaaaataaaatatataaattttcaaatggggatgtgtatgtaggaaaatttttagaaggaaagatggaagggcaaggatcatatactttttttgttgatgaaggaacggctatggagtacataggagagtttaaagaagacaaaaaaaacggaaaaggaaactttgtattttcaaatggaaatgaatatataggccattttgaggaagatatgatgaacggtattggaaatatgttatataatagcaaagatgaatatattggaacttggaaaaatggaaaaaaagatggaaaaggtatttataagtggagtgatggatgtatatatgcaggtgaatttaaaggtggaaagatggaagggtatggtatttgctataatagtaaaggggaagtactttatgaaggagaatggaagaataatttgattcatggtaaaggaacttatatatgggaaaaaggtaaaaagtatataggtgaatttatgcatggtaaaaaacatggacaaggaactttttatctaaataatgaattggtttatgaagggacttggaaatttgataagccatccatcttcgacagaacattagatgaaatattttcattaagactatagctttatctattaatagataaagcttttttctaatacttactgtaaataagtatgaatgatattgattagtatacactatcaatattaactcaataaatgtgatattaaaaatttttgattgattttaagaaggagggatatattgaagagattaattgctttagtgttagtaatacttattgttttattttatagccctgaattgatagaagaaggatatgatttaaaagaaaaattttttcaaagtgaaatatggaatgaatttttagacaaaataaatataaataataattctaagaaagataaaaaagaacaaaatcaaaatttacaatcaaataatactgaaggggagaacttaggagagtcagatataaagaattttgaaaaaataagcttaggagataatttaagctatgttttatcaagtattggtaaacctggtagaattgatattagtgaatatggttttgattggtatgtatataatcaatatggaaaagaatttgcaatggtcggacttgaaaatgatgaagtagtagcactttatagtaattctattaattcatgtgaaaatcaagatataaaactaaatcaagatagacaaacagtgagaactaagattacaccattaaaatataagagaaaaggaaataccagatatataataaactcagaaaatcaatatgatataataagtaaagaaggtaagtatattacaattttctacgatattcatgaagaaaatagagtttgctcatatttaataattgataaaagtactgaagatgagtttaaaaaattatatccagatgatagagaagaacttaaaaaatgttttgaacttgaagttatagaccttgtaaatagtgttagaaatcaaagaggattaaactcattgagatacagtgaacaggcaactttgagttcaagaaaacatagtgaagatatgagagataataatttttttgaccatataaataagaagaatgaaactccatttgacagaatgaaaagagaaggtatagtatatacttcagctggagaaaacatagcagcaggacagattaatgcaatatatgcgcatgaagcttggatgaactctgaaggacatagaaaaaatattttggggaactataataatattggagttggagtaatatttggaggaagctataaaacatattacactcaaaatttttataaataactaaaatatttgaaaggaagttaaaaaatgacatcatggaaaaaaaagacagtatataagtgcttaatagcagtagtcttgttttgtggaatagtgttaatatctaattttagtaaagtttctgctttgatgatggatactaatggaaatgttttgattaaacatggttcaagggaaaaaaagctaatagcaattacctttgatgatggtcctcatcctaaagaaactagtcaagttttagatgtattaaagaaatacaatgtaaaagctactttttttatagctggaaaacatgcaaaatggtataaagaaccattagtaagagcaagtaaagaaggtcacgagataggaaatcatactttcaatcatcctgatataagtaatttaagttctagtcagatagaagaggagattgttaagtgtgaagacattttgaaagaagtaactggaaaaaaacctacattatttagaccaccatttggaagttatagagaaaaagacttaatagaaattgcaaaaaagcatgactataaagttgttttatggacaggtgtagatgtgaaagattggaaaaatccaggagctaatagcattgcagataaaataattaataaagtaaaaaatggagatataatacttttgcatgattatgcaactaatgatacagttgaagctttagatatgtttattccaaaaatgattgaaaaaggttttaaatttgtaacagtttctgagttgataaaataatttttaggggggagatttacagtatgattcttatgatagacaattatgattcttttgtatacaacctagtccaatatatagaagaattaggggaagcagttgtagtaaaaagaaataatgaaatcaaaataagtgacattgaagaactaaatccagaggtaattgtgttatctccaggaccgtgttctccaaaagaagctggtatttgcatagatattgttgagcattttaaggggaaaaaacctatactaggaatttgtttaggtcaccaaactattggatatgtttttggaggagatattataaaagcacaacagcctgtgcatggaaaagtatatagtatcaaccatactaataaaggagtttttaggggacttaaaaatcctttaaatgtcactaggtatcattcactaataattgattccaatacagttccaaaagaattagaaattacagcaattactgataaaggggaaataatggggattaggcataagaaatatttaatagaaggagtacagtttcatccagaagctattttgtcagagtatggtcatgaaatgcttgaaaattttataacagaagctagagaaagggtacatatgtaatatgataagagagataaatactaaattaaattcttttgagatatttactatttttagaaatgaacatgacagttttatattagacagtgctatggataaagaaaaattgggaagatattcttttataagtagccaaccatttaaggtattaaagtataaggatactgatgaaaatcctttagaagttttaaaagaagaactacataagtatagggttgtaaatgatactaatcttccatttgtaggaggtgctgtgggatatttatcttatgatttaggtaattacatagaaaatttacctagaactgctgtagatgatattgagatgcctgatatgtattttggattttataatcatgtaatagttatagaccatcttgtgcaaaaaacttatatagctactccaaacatagatatcgaattagaagaaaagataatagatgatatagaacaaagaatattaaaagaagagaaaaaaggtatagatagcatatgttatgaagaaaaagaagtaacacctataagacttaaatctaattttacaaaggaagaatttaaaaatgcagttcaaagtgttagagagtacataagacaaggagatatatatcaagctaatttaacacaaaggttcagtggagaaacagaacttacaagctttgaattgtatagggacttaagaagatttagcccagcaccatttggggcattcttaaactttgaagatacacatatattatcaaattctccagaaagatttataagatgtgttaataagagaatagaaactagaccaataaaaggtactcgtccaagagggaaagataaagaagaagatttaagacttcaacaagaacttagaaatagtgaaaaagatagagctgaactacttatgatagtagatttagaaagaaatgatattggcagaatatctaaaactggaagtgttaaagttccagagctatttgtaattgaaccatatgcaaatgtaaatcacttagtttccacagttgtaggtgagttaaaagatgataaagatgctactgatgtaataaaagcaacttttccaggggggtctataacaggagcacctaagattagagcaatggaaattatagacgaattagagccaacgcaaagaaatgtatatactggttcaataggttatataggttttaatggtgatatggattttaatatagcaattagaacaataatcaaaaatgacaaaaaagtctattttcaagttggaggaggaatgacttgggattctgacccagatgaagaatatcaagaaacacttgataaagctaaatccataatgaaggctttgaggggatattatgaagaataatgtaggttttgatagtagtttaagtaaatttggaattggtttgtttgaaactattagagttaaaaatggaatagcagtagatttagatatccatatagaaagaatgctaagttcaataaattgtttggatttagatataaactataaaaaagatttcttgataaatgaaattgttacatatataaaaaaagaaaatgtcattaataaagcacttagaattactgtttttgatgaaggttataatatatctattagggatattccatataatcaagagacgtatgagaaggggtttaaattagctatatcgccaatagttagggggaatagtttaattcatagacataagactactaattattttgaaaacatatataccaaaaatatcgcaaataagactggttataatgatggtatatttttaaattcagaaggtgtaatattagaatgttctatgagcaatattttctttataaaaggagaaagagtgtacactcctagtgatagattaccgatattaaatggaataataaaaaaaaggattatagagatttgtgacgaattacatatagagttgatagaaaatgaaattaatatatcagaaattagtagttttgattttgtttttgtcacaaatagtcttatgggcgctataaaggttacagaaattgacaaaataaaatttaataaagaaaatgttgtttttgataaaatagtgaagttattagaataaattaaaatattaacaatttgttggagacaaaagatgataggttgtatttatgaagtatacaatgaagagatgactaaaataatagaaaaccaaaacactttggctgtatatttagtaggttctagtaaagacgtagattttactctttatgatgtagagataaacgatattgatgtgttcgtttttgtaaaagaaggggaaaaacaagagagaatactgtttaaaaaaaagggaatagaatttgatgtaaattacttttcaaaagatggtgtaaaaaaattattatcaaatagggaatatttctttgtgaaagaaatgaaagatgctaaagtactgtttgatagggagaatatatcaaatattataaaagatataagtagagatatttacttagaaggacccagtaaaatgtcattagaggaaaagtcttttataaagcaagatattggagcaaaaatatcgaatttaaaaaataaagaaaaatttgatgtttttgaatatcattttttgacgaatttatatttaaaagatataataattgggtactttaatataaatgataaatgggtaccaaaagacaaaaaattgctaaaagttttaaaaaaagaaaataatgagctttttgaactagcgtcaaaagtaagtgaaaattatgactatcaaagacttttagatgtttataattatatttttaaagaaattgagacaaaagaggttataaaactaatcttctagtcacaaatcaatggggggagtttaaatgaataaagttgataaagaaaagatacaacatgcagtaagagaaatactagaggcaattggagaagacccagatagagaaggtctaatcgagactccaaatagagttgctaggatgtatgaagagatattctctggtcttagtgaagaaccaagagaccatttaaaagttctttttgcagatgaaaaacatgaagaattagtattggtaaaagatattccattttattcatgttgtgagcatcatctagttcctttctttggaaaagctcatattgcttatttaccaaaaggaggaagacttacagggctttctaaacttgctagagtaatagatacattggcaaaaagaccacaattacaagaaagaatcactaaaaatgctgcagatataataatggaagaattacaaccttatggtgtcttagtagtagtagaagctgaacatatgtgtatgacaatgagaggtgtaaaaaaaccaggttcaaaaactgttacatcagcagtgagaggaatatttgaaaaggacattgcgtctagagccgaggctatgagtttgattactatgaagtagcaatttattatagatataatcatttattgagatataaaatttaatttaagggagtgtcattaattgtgtttgattatggtaaaagaacttatataatgggaatattaaatgtaactccagatagtttttctgatggaggagattttaataacttggacatagcaatacaacatgcaaaagatatggttgaccaaggtgcagatataatagacttaggaggagagtctacacgcccaggtcatagctatgtagactcagacgaagagctaagaagagtaatccctgtaataaaaaaacttaaacaggaattggagataccaatatcaatagacacttataaggcagatgttgcagaagaagcattaaaattaggtgtcactatggtaaatgatgtttggggtcttagaaaagataaaaatatggcttctgtaataggaaaatatgatgcagaagtgtgtataatgcataatcaagatgggacaaactatgacaaagatataatggagtcaataaaagacttttttaaggtaagtatagaaatggcaatgagttgtggtgtaaaaaaagaaaaaatagtacttgacccaggcgtaggatttggcaaggattttgaacaaaatattgaagtattgagaagattaaatgaattaaaagatttagggtatcctattttgcttgggacatccagaaaatcagtaataggaaaagtacttccagttgagcctaaaaaaagattagaaggtacaatagctactactgttcttggtataagagatggcgtagatatagttagagtacatgatgtttatgaaaatttaatggcagctagaatgactgatgcaatatatagaaagtaggtataatataatggataaaatattacttagtaatctaggattctatggatatcatggtgttcttaaagaagaaaattttctaggtcagaaattctttgtcgacatggaactttatattgattcaagagaagcaggtcttagtgacgatataaataaatctgtaagctatgccgaggtttacaatgttgttaaagatattactgaaaataaacaatttaatcttttggaggctttagcggaaaatattgctgaagaagtcttgaataaatttatacttataaatggagttatggtcagagttagaaagcctgaggctcctgtaaatggtatttatgactattttggtgttgagataaggagaacaagagatgaataaggcttatttgggaataggtactaacatgggtgatagatttgataatttatcaagagcatgtgaacttttgaaaaatagtgattctatatataaagtaaaggaatcaagtttatatgaaacaaaaccatggggatatacagaacaagcagattttctaaatatgtgtgtagaaatagaaacagaatttgaaccttatgagttgttagaatattgtcaagaaatagagagagaactacacagagagagaatagttcattggggaccaagaactatagatgtagacatactattttttaatgatgtagcttccactgatgaaagactaacaatacctcatccgaggattcaagatagagctttcgttttgataccacttatggatttaaatgaagaacttataataaatgaaaaaacagtaaaagaacatttaaacctcctatctgctgaagaaagagaagaagtaaaggagcttgtaggttatgaaagaaaacctatttaataataattcaaagatagagataaatacaaataacaaaaagataactgtaaaaaaagataaacttataatagctggaccatgtgcaatagagagttatgagcaacttttggagactgctaaatttgtaaaaagtcagggagcaaatattttaagaggaggagcgtacaagccaagaacatcgccaaattcatttcaaggattaaaaaaagaaggtcttaaaatattaaaagcagttaaagacgaagttggtatggctgttattacagaacttatggatgtaagagatatcgacgaactgtatagtataagtgatataattcaaattggttcaagaaatatgcaaaactttactcttttaagtgaagtgggaaaacaaaataaacctgttatgttaaaaagaggaatagcatccacaattactgaatggataggtgcttctgaatatatagcaatagaaggaaatagtaacattataatgtgtgagagaggtataagaacgtacaatgattatactagaaatacattagatttagctgcggtacccattattcaaaaggaaacaggtcttcctgttgtggtagacccaagtcatgccactggagttagatatttggtaaaacctatgtcactggcatcttttgcatgtggagcagatggaataatggtagaagtacatcctgacccagaaaatgctttgtcagatggtgctcaatctctttgttttaatgaatttgaagatttaatgaaatcaattaataattattaaaagaggcaagagcctcttttttattcgtaatcattgctaaggtaaatttataagttataatttgatagttagattatttaatataaataaagatttaatattgatagaattaatataaaaaataaaaattttttgattaataagaaggatatcaataaaaaaagtcgaattgtgtatattgagtgattgacaaatttagaatatagtgtagaatagaaatgttaacacaaaaaattacaccagaaggtgataatatgaatgatataaaagacattattgaagaaataaaagctagatgcgatatagcaagtataatatctgaatatatgaatataaaacaatctggagctaattacaaagggttatgtccatttcatggtgaaaagacaccttctttttatataaatacatcaaaacagatttataagtgttttggttgtggtgaaggtggagacgtaataaattttgtcatgaaaatggaaaatttggattttatggatgctgtaaaaattttagcaaataaatgcggtatagaaattaacactaacatgaatgaagaaactaggattaaaatagaaaaatctaagaaatttcaagatatccatacggaagcagctagattttatctttcaaacttattgggaagcaaaaatcttgggtatgaatatttaagaataagaggactagatgataaaattattaagaaatttggtttaggattttctttggattcatggaattcacttatgaatactctaataagtaaaggatacaaaaaacaagacttattggattgcggtctaattgcaaaaaatagagatggaactaattgctatgataaatttagaaatagagttatgtttcctatatttgactatagaggaaacataataggatttgggggaagagtattagatgattctttgccaaaatacttaaattctccagacacattaatttttaataaaaaacagaacttatacggattaaattttgctagaaaaaatttagaaagtaaaactatagtcttagttgaaggatatatggatttaatttcgctttatcagtatggtataaaaaatgtagtagcaacccttggaacagccttgactgaacaacaaggcattttaataaagagatatgcggacactgctattatatcttatgattctgatgaagcaggaataaaagcgactttaagagctatagatatacttactaaattaggtatcaatgtaaaagtgttagacttaaaagatgctaaagacccagatgaatttgtaagaaaatacggacttagtgattataaaaaagctatggatgtttctactcactacataaaatataaaatagatcatcttaaaaaagaatttaacattcaaaaagatgaagaacgagtgaagttcgcaaaagaagcttctaaaattataaaacaattgacaagtcctgttgaaattgatttttatacaaagtatttaagcaatcaaatagatattaatgtcgagtctataaagagagaagtttatggcaaaaattacaataagccatataataacaaaaatcaaaagaaaatagaagaaaaagtaattgaaaaagtcgaagtcagacaagacggaaaacaattagttgaagaaactctaataaaaataatgttagaagacaaaaaaattagagaaatagcgttacttaaagtagaagaaagtgattttttattgaaagaaagtaaagaaattttaaattacatgattaaaaatcaagaattggacaaaataactattgacaaattgaaaagtttaaacatatccgaagaatacttaaaagaattaaattcaatttctttgaatagtataaacttagagaacacaaaagaaatagaaggaataataacaaatatcagaaaaaactcattagaagagcaaattaatagcttgttgagagaacaacaagaattagaaaataataatgatatgaaagaggtagatggtagagttatggaaattgctttaaaaatagttgagataaataaaattttaaagagcttgtagagaaaggaggtttgagtgtggaaaataaatcgaataaaaaagagttaaaaaaggttactgctaagacattaatagaaaaaggaaaaaagcaaggttctctgacacttgcagagataatggaagctttttcggagactgaacttgataaggatcaagtagaaaatctttatgagactttaggaaatttgggaatagaaataacagaaacaaaaaattataaagctgatatagatttttcggttgctgatgacgatttaagtataggccacttagatgaagatgcagaggcaatttcacatgatgactcttctgcaatagaaatagaaactgtggatttatctttaccaaaagggataagtatagatgaccctgtaagaatgtacttaaaagaaataggaaaaattcctctacttaaaccacatgaagaagtagaatttgctagaaggatgcacgaaggtgatgagatagcaaaacaaaggttagttgaagcaaacttaagactagttgtaagtatagcaaaaagatatgtaggaagaggtatgcttttcttggatttaatacaagagggaaatttaggtcttataaaagcagtcgaaaaatttgactatacaaaaggatataagtttagtacttatgcaacatggtggataagacaagctataacacgtgctattgcagaccaagctagaactataagaataccagttcatatggtagagactataaataagctaataagagtatcaagacaactacttcaagaacttggaagagatccaaaaccagaagaaattgcaaaagaaatggaaatgacagaagataaagtaagagaaataatgaaaatagctcaagaccctgtgtctttagaaacaccaataggagaagaagaagatagccatttaggtgattttattccagatgatgatgctccagccccagcagaggcagcagcatattctttattaaaagaacaaatagaagatgtacttggttcgttaaatgatagagaacaaaaagtattaaagcttagatttggtcttgaggatggtagagccagaactcttgaggaagttggaaaagagtttgatgtaactagagagagaataagacagatagaagcaaaagcactaagaaaactaagacatccaagtagatcaaaaaaacttagagattatttagactaaaaagatacatcattgatgtttttgtgataaatgccatgagataagtgatatctcatggctattttgtagtaaagatttaattttatttttgtagttatttcagtctaatatctataacttggattaaatcctataaataaagggaattgaaaggagaattatatttgaaattaacagatagattattgaaaatagcatcattagtgtcagatggtaaaaaaatagctgatatagggacggaccacggatacataccagtatatttgttaaaagagggaaaagtaccatttgcagtgctagcagatgttaataaaggacctcttgacaatgcacataaagaagtcatacagaacaatcttttagataaagttgatttacgattgggttctggtatagagatacttgaaataggggaagtagaagaagtgataattgctggtatgggtggaatcttgataagtgagcttctcgaggctaaaaaagaagtagcacataatgtagaaaaattaatattacagccaatgcaagcacaagaagaacttagatattaccttttaaacaacggatatgaaattttagaagaagttttagtgagagaagattttagaatatatgagataattgttgccaaatatacaggtaaaaatactataatagaagatgagatatattatgaggttggaataaagcttttagaaaacaaagattctctttttaatgattttatagaaaaaaagataaagacatatagttctatagttaataaattagaagggaaaaatggggaagctatagataagaagagaaaggaaagcgaagttgcaataaaaaaacttgaaaatttaataaaataaataggaggtatatatgctattaaagagtctaactagaaaaattgaaaaaaagtatcctctaaacttagcagaggattgggataatgtaggtcttatagttggagattttgatatggatgtaaaaaaggtattggtatctttagaagctaatgaagatgttattgatgaagctatatccaaaaatatagatttaattgtgacacatcatccttttatatttgggaaaattaataaaattaatagtggagatttaaaaggcagacttatccaaaaacttattaaaaatgatatatcactttattctatgcatacgaattttgatatagcatttgatggtctaaatgactattttatggaaattatggaatttggtaattcaaaggttttagatataactaaaagcgaaaatttgtataaattagcagtatacgttccacataactattcagatgaacttagaaaggttttaagtaattcaggagcaggtcatatagggaattatagtgattgtacgttttcaatagaaggtgaaggacaatttaagccattagaaggctctaatccgtttcttggaagtgtaaatgatatagaaactgtaaatgaagttaaaattgaaactgtagtaccacagaagcttttaggtggggtaataagttctatgttagatgcacatccttatgaagaagttgcatatgatttgtacaagttagaaaataaaggtgagatatttggactaggtagaataagtaaacttgataaaagtatgacattagaaagtctttcaaggaaaataaaagagaaattaaatatgaaacacataagagtagttggaaaccttagtacagacataacgaaagtagccgttgtaacaggagctggttcagaatttgtaaaaaaagctaagagacaaggtgcagaagtactaattacgggtgatgtaaagtatcatgaggcacaagatgcacttgatattggaatgtgtatagtggattgtggtcattttgatacagaagatatattcaaaaatgttatgaagagatttttagatgaatttagtgaaattgaagtaataaagagtaatgtatatttgaatccatttagtactatttagaagtgtttgattaaaaaatactatataaaaaataaatttgagtttaattagggggataatgatgaaagtagcagtaatttttcatagtgtttgtgggagtacatatttattagctagagaatataaagaagtgcttgaagaaatgaatatcgaggtagatatatttagagtaagtgacgaagttgcaaaaacacttcctcaatattatttgataaattacaaagaatacaaagacgaatttgaaagtataaatgtaattaaatctggaaaagaaatattagattatgatgctatatttatgggttcaccaacatattatggaaatgtatctggaccaatgaagatgtttatggatagtttttctgatatttgggtaggtgctcctttgagtggtaaaatatttggttgttttgctacagcaggttcacaacatggaggaggagaattagctttgcaagctatgaatatatttgctcaacatatgggaatgactcttttgtcagttccatgttcagtaagaggaggttatccagcgtatggaatacttcatatagcaggagataattctgatataagaccaaatgatgatgccaagataggtataagagattacctaaaaagacttaacatataagaatatcatataaaaatacctaaaagtagctgtatatacttttaggtatttttacttaattataaacgtgaagctttaccagaaatatggtcaatttctattttaacaacagttgttaagttcatatccttctctatgtacttcatgccttcttcaaagaatcctttagaatatttttttattatttctacaagagcatttttcttttcttcattttctacagtgcaagcttttccaaaaactatagcactagaataagtagtactaaatttatctggaataacactttcattagcaactactaaaaaagaaactttgttgtttttcgatatattatctaacttatgtccatttcttgcacaatgaaagtaaatagaatcattaaagtatacataatttacagcaactccataaggataaccattttcagatatagtggaaaaagtaccaaattcaccattttttaatacttcaacagtatcttcttttgtcatttctctttttttcaatctcatttctttaaacataatatcatcctttctaattttgatgcttaaattaaattttagaacatttataaagattatgctatgttttttacaaattttaagaaaaaaatatagtttaagataaaaggtagtgaaagagaagctatttggaggtttatttatgatattattgttagagtagtacaaacaatactaataaatttaatagctggtttcttgttatttaaggtagtaagcatgtctataagaaggggaagttatcgagggtagaagttgttatttataacgatattataaagaaaatattattatataaaataataaatagtaaagaggtatcaagttgaatataatacttaatacctcttcaaaattaaattataaaagtgttgtgggaattgtcctatacatggtaaggagataataaagaatgtatctttaaagtctcaactaaacagcaaaatttatccaacaaacatacaataaatgcttctttgtatctaggtggcttaacagtaagtggccacatgtgttttaaaattatgtccgtttctttttcatttatttgaaaaaataaagttgcattttttaatgcttctctagggtgagtaaatccatgtaatccttttctatcacctttgtaatgccaatcataaagaaaaaagtcgtgtagtaaagctcctctaataacactttgaatatcaacacgtaagtgcaattttttacataatagataactataatatgctactgacaaactatgttcaagacatgaaacattgccatgatgaggaaatgttctcataagttgaactttttcagaagaaagtatctcagaagcacattcattaaaatatttgatttcagcttttgacaacattatgaaaatctccattcttagtaatatataaatactatacttcaacgataatatgaaatatttcttatcctacaaaatataatacccaataatacaagtaagataccttttatggtattttaaagtaagagagattttattaggctaaacaatgaaaaaattaaaagtaaagctatagcaatatatagtatttttccaagaggattgccaaaatttatagtccatccaataccaaaccttttattaaccattaatgatgggtcatttggattattatacatgatgcctgctatccaatacttctcatcttcttctggagaataagatgagttgaattttaaatttggggaattaatatatgttgctattaaataaattataactaaaagcgttgtaatattcatagcagttgatagttttgtttttattgataaaagagtagtaaaaaactgtgttgtcattataatcatcaatattaaaaacaaataaccaattttatttaaatatttaatgttttcaactctactttcttcaattctatttgtatctatcttaatccttgactttatggatccaatggaagttatatataataaaaccattaaacaaaagtcagtaccgattaatttaaatacattaagaaatgatttatctataaaaacatcaggagacccatttatgttccaatgagtggcaattgagtctggcaatttattataattaaatgctataaaaatactcatccccaaagtaaatagtatcggtattaaatagattattttaaatttttttattattttatttttcttatttataaaatccatatctactattaattttgaatctacatctatatgacctaatttagaataaatttctgatttaagcttcttagcttttttatgtgtatgaatatatagtatactctcatataataaaaaacctataataccaataaaatatgaaagttccaatttattaaatgtaaaaaccagaataaaaactaatataaagtctataataaaacctaaagataatagttttttaaattctttatctaattttataaagtaattataatttttatgctcttggtctatagaaactccatagatgtgttttttacctacaaaatagggcataaaataaaatgtagcatacatcaaaattagaactggaaatattgtaaatagacattcaatcttactcataatatttcacctcatacttgtcaaataaacttgaacttagtgacaaaaattcttctttactaatacctgataaataagattttgccaccaataattccaagtcaagtttatttttttgacgagttgtattatctattttcattggtagttgagctacaatagcaccttttcttctatcaatatttaagaatccctcttcttttaactcattgtaggatttgttcactgtatgtaaatttacaccaatattttctgccatacttcttacagatggaagtgattcatttattttcaattctcctgaagctatagccttagttatttcttctttaatttgtacataaatagatttatcactattaaaatctaaatttaaaaccataaaaaacctccattatgctttataaatgaaaacgattgttatatacatagtataacataaaaaataataacaaacacaaaatataagtttatattttgtaaaaattgtaatttaaaaaataacataatttttattaaaataatacagatactatttatagatagaaataaaaattagaaaggagaaaaaatatgttaacatatttaatgaaaagacaaatgcataaaaaagatgatggaatgagtaaaccaatgatgattacaggagctgtaattacaggtgtaggagcatatgctgtatacaaaatggtaaaaagccataaatctaattctcaaatggtcaatacaaattattatggaaatagcgattatgatgattataaatatgacgaatttgattatgactgtgattgtagagacacaaaacaagattatgaatatgaagaattaaaaaaaaaagtaaaagaatttaattcaagaagaataaattgtgaaaattgtccacatgtttctcaagaagaaatgatgcaatatgtaaatagtgttaaagatgtaaaggaagatattgatttacatgaagatgctaaaaaagataatatttacaaagaagatgaatacaaaaaatatgaagaagaataagtaatattttgtataactgaacaaatagtaatgtcaaattatttaatatctagttttaatatgtaagttgtaacttaacttgaaagaatcagtatcattctttagatagttaagttacaacttacattttgtttttataaattttaatagttctttgtgactattttgtaattttagaaatattttagtatccagggtaattgtgtataataaaacttgtatagatagatagtatgaaattaagcagatagtttaaaattaaaatgaaaagaaaggaaatagttatgttaaagttgttgatagttgaagatgatagtactatatcttttggaataaagtatgctttagaacaagaaggatttagtatagatatatcaaaggatttatctagtggaaaagaaatgatttcttctaatgaatatagcatgatactgttggatgttacattgccagatggaactggttatgagctttgtaaatatataagaggattctctcaggttcctataatattcttgactgcttgtgatgaagaagtaaatattgtaatgggtctcgatataggtggagatgattatataacaaaaccttttagaattagagaattaatatccagaataaaagctgttttaagaagaaaaggtaatacttcagaagaaaataagaaaatacttaaatttggagatttaagtatatatacattagaagctagagtatataaaaatgataaagaaatatttctgacatcagttgaatataaacttcttttaattcttatacagaataaaaatactgttttaagtagaactcaaatattggaaaaactttgggatgtaacttatgattttgtaaacgacaatactctaactgtttatataaaaaggcttagagaaaaaataggtgatgatttatgtgaaccaatctacatagaaactgtaagggggattggttataaatggataggaagtgaaaatagtgtttctatataatccagaagtgaagaagtttttaagtaagtatgttactttgatgtttattgttatcataatatctattggatttagcataatcaacgtgtctttaactaaagagatggttgtaagaaataatcaagctataatagggactttatcgagtaagtatccaaacttagaaagtcagatagtagacataataactcaagggaagtctatgaagaacatagattatggtcagaaaatattaagtaagtataattatgataaatctattaagataaactctgagcctattatttctaaattagttttagagactatcaaaataaatataatattagtatgtataatatttattttgatatttgtgttggttgttagatattttacgtcaatttacaatgatttatcagatatgactaagtatgtttactatagttcagagggtaagccatttgatatgaaaaacaagaatcaagaagggcagataggtcttctaaaaactgaactcttaaagatgacgacaattcttaatgaaaaggttgaacttttaaaaagagaaaagatatttttaaacaatacaatttccgatatatcacatcaattaaaaactcctatgacttctttaataatgttgaatgatttattatataatgatgtaccatacgaagtaaaaatcgattttttaaataagataaaaaatcaattaaatagaatggattggttgattaaaagcatgcttaaattatcaaaggtagaagcaaaagtgataaattttaaaaaagataaggtaaaatttagtgaactcatacatagagcaatgctatctatgaaaatacctatggagattaaaaatcaaaaactgactatagagggaaatgataatgtatcttatattggtgatattgattggtctgtggaagcactagtgaatataatcaaaaattgtgtagaacatactcctgaatttggaaatataattataacctataaagaaaatccattattttctgaactaataataaaagatgagggtgaaggtatagataaaaaagatataccacatgtatttaaacgattctatagaggaagaagtagttcaaaagaagatagtgtaggaataggtcttgcaatgtcaaaatctataatagaaagccaaaatggcgatatatatgtaaacagcgaaaaaggtaagggtacagaatttcatataatatttcataaaatgtatgatagtgactaatctgtaatatttaattcactttatagtaatagccaaaacctaatatatgaagtatagaatataaatattggaggtagttatggaaattttaagagtagaaaatctaactaaaagttatggtaaaaatgaaacaaaagttgatgctataaaaaatgtaagtttatcagttgaaaaaggaacgtttatagcaataacaggtccaagtggaagtggtaaaagtaccttattacatttattaggaggagttgacagaccaactagtggtaaggtttatataaatgatgttgatatatataatttaaaaactaaggatttggcgatatttagaagaagaaatataggtcttatatatcaattttacaacttaattccagtcttaaatgtgaaggaaaacatattgcttccagcagagcttgacaatagagatattgatagagaatattttgatgatttaatgaaaacattaggtctaattgatagagaaaagcaccttccaaaccaattatcaggaggtcaacaacagagaacctctataggacgtgcattaattaatagaccttctataatattagcagatgagccaacaggtaatttagatagtaaaaattcaaaggaaatattagaattgttaaaattgtcagtaaaaaaatacaatcagacactaataatgataactcatgacaaaaatatggcacttcaagctgatagaattataagcatagaagatggaatcataaaaagtgatgaggtgatgtagatgaatttatatacatcactaaccattagatacttaaaacaaaataaaagaagaaccattgtaaccataatcggtataatactttcaacagctttaatttgtggtataggaaatatatttgaaagttttatggattatcaaatgagagaaactataaagaatgatggaagtttccatgttacattttatgatgtaaatagaaaaaatgtggaatatgtaacgaaatcagctgaaatagaaaaacatgcatttaccaaacaacttggatattctaaattagaaaatagtgaaaatgctatattaagtataaagcaatatgatcaaaatgcaataaacggatataaagtttctataaaagaaggtagatttccagctaaggaaggagaaattgttttaagtgaaagtattattaatcttatagatgataagttaaaaataggagataagataactttaaaagtaggggatatgtttgactcaagcaagaaaaagattgatagtatgacatttcatgaaggtgattatatagcaaatgaaaaagatagaacttttaaagttgttggtataattaaaaaacctgggtttgaacgttataatggaattgcaacagctatagcctactttaatcctatgaataattacaatgatacaattaatgtatcagtagcagtaagaaatcctaaagatgtgtataagataagtaataaaataagtaaaaatatatattcaaataaagataaagaagcagtttctgatatgataaaatacaatgaacatttattgaggttacaaggtgctagtaagtattcaaatataaatagctctataaagtctataattatagcagtaactattttagtaatcatatgtacaattgctacagtgtacaattcctttagtatttctataaatgaacgaaaaaaacagtttgggatattaaattctataggtgctacatctagtcaaattaaaagattagtttttatagaaggtattataattagtttaattggtataccaataggactaatatctggaacagtagctatagacctattgtttaaaattataaataagtattttactgaatcggttgttactaagatgagtttgcagatagtgtataatccaataataattattgttagtataataatagttttgcttacaatctttatatcaattctactacctgcaatatcggcttctaatatttctccccttaatgtgattaaaaatactggagagtataaagtgggcaaaatcaaaagctcaagacttattaaaatgatttttaaaactgaaggagtacttgcatataaaaatattaggagaaatagaaaaaaatttataataactcttttttctttaatggtaagtataataatatttatatcttttagtggctttacattacttttactaagaggtgaagaaattagaaattctcaaagaaaatatgatttgtatttaactgcaaagaacacagctaggtctgtagaggatactataagtgaactagaagatattgatgggataaaaaactttgaattggcaacaggacaatatgtgtctataagagtaagtgaaaataaaataaataaatccaaggaagatttaatcaggaaatattatcaaaaatataagattggagaaagttatgaatatgatttcagtaataatgaattgatttttccgggagattttgcagtaaaaaacaaaataaataacttagtacagggctcttttaataaagagagagcaattgaagaaaatggtgttatattagttagaaaaagtgcaattgaagaaaatgggaagaaaggtgtagtagaacttaccaactataaagtaggagatacagtaaattgtgaatatcttgatgaaaatgccttaagtaaaaaagtaaaggtcaagattcttgctataactgatgaagaacgtctaggttttggttatcaaaatatggggttacaatttataacttatgatgaagttgctaaaaatttaaatttaaaattaagtaaaagccttatatttattgattcaggaggaagcattaagactaagaaggaaatagaagctttggcaaataaaaatgattttaacttttatgatgaaatttcaagcagtgaaagtgaaaaacaagatttaaaggttattaaaatatttgtatatggttttatagtagtgatatctttagtgagtgttacaaatattctaaatacagtaagtacaagtataaatctaagaaaaagagaacttgcagtaatacaatctataggggttactcctaaaggatttaggaaaatgatatatttagaaagttttatatatggtatactgtcattgttgtttggaataccaattagtattggtataattctaattatgaataaacttatttcaggtgtaattgaattttctccgattataccgtggacagccatagttatctgtatagtaagtgtttttataataacttttatagcagggtatataccaatgagtaaattaaataaagaaaatataatagataatataagaagagaaagtatatagatataaaaataattcttaactatataaaatattattaaaatcatttaagtggtataaaatattattatatcacttaaatgattttttatttatataagaaatctaataataaattactagaggtatttaactatttagaaagaattggtattatataaagtaagagaatatataataagaaagaatatttgattttatttgaaaacaaaagaaaaagaaggtgattactatttctcatataactgcgaagaatatgtataaaagtttagaggaaagaataaacaagtttccacaaggtgctccaccatctgatacattatacaaaatactaaatgtactatatacagaacaagaggcgaagttagttgctcagcttccaataaagcctttcagagtaaaaacagcagctaaaatttggagtgtaagtgaaagtgaagcatatagagtattggataaacttgctagtaaggctctgatactagatatagaagataataaagggaagaaatatataatgcctcctccaatggctggtttttttgagtttgccatgatgagaacgagacacgatatagaccaaaaacttttggcagaactttactatcaatatatgaatgtagaagaagattttatcaaagatttattttattcaacagaaacgaagcttggaagagtatacgttcaagaggaagttttaactaatgataatgaggttagtattttagattatgaaagggctactcatataattgatgaatcaactcatataggtataagtatgtgttactgtagacatagaatgcaacatgttggaaaagcttgtgatgctcccatggatatatgtatgacgtttgacaatgtagcaaattctttaataaataataaatttgcaagacgtgtggataaaatagaatgtaaagaactacttcatcaagcatatgaacataacttagttcaatgtggagaaaatgttaggaaaggggttacgtttatatgtaattgctgtggatgttgctgtgaagcaatggtagcagctaaaagatttggaaatcttcatccagtacagacaacaagttttataccaaatataaaccatgaaaattgtgtaaagtgtggtaaatgtataactgcatgtccaatagatgcgataagcaaggttaaggaagatggtaaagaatatataaaaattgatgaggatagatgtttaggttgtggagtttgtgttagaaattgccataaaaatagcattatgttattaaagagagatgaaaaaataataactccagcaaattcagtacatagagcagttctcatggcaattgaaaaagggcagttacaaaatttaatttttgataataatgctctggctagtcatagagctatgggagctatactgtcagctatattaaagcttgaaccagctaaaaagattttagccagtaaacaattaaagtcagtatatttagataaattgttaagtatgaatgataaatagaaactaacttaaaaaaggcaaagttttagacttatctatatcttaataaacttatcatttaatatttaaatttaatttttacacatataaaacttataacttaaataaaaaaaggctatattcaattaatattacttgaatacagccttttttagttatgttaagctatttcttttatttgcttaaatgagttttcatttccatttccaccaatttgtgttacagatttaaatctcatagttttaaatagttctttttgattataatctagtgagtttcctactagcattacaggagatttagtttttccagccaaaactccaacagataatccgtctattaaatcatcttgtttattcattccatttttagcaacatataaattgtctatcttagaatccttgtaaaattcttttattacttttgcattagtttcatttctagtgttacctgatattctctgtggattttgaagtttactttctatatttttagaaactgtatattctccaccgattacataagatttatcaatctttttgtttttaaataagttatttatttcagttatattactattttcattagtaagtattataggcatatcattttgagctgatacagctccaatgcttactgcatcggctaatcctttttcgccattaactactgaaatctttgatatattgctaatattgttcaattctttagcaatgttcatagaagtttgatatctatcacttcctgaaattctagatacagagatattgtttgattttatagtatctaaagatttttcatttatagaagcctctccaccaactacatatacatttttaacttttaatctctttaattcagccaaagttttttcatttatttgagagcttccagtcaataatataggagcgtttttcttgtatgcaaatggtgttgcggccaaagcatctgcaattgctgaatcgtttattaaaactgcattttcagcattttcccaacctgcttgacttatcttaatagaagtttcatatctatcagttcctgtaagtgcacttgcatttacttcatcttgatatgtaacctcaaatctagcatttggacttcctaagaaaacaattacgcctccttttggcaatctaactctattgttctttgtaactaaagaatagtttacaggaacacctttatcatcataaacagcaaaagctgaattttgaggaagattaacttctatttttttatttgcgatatcgtcaccaatcttataccattttgcataaccattggattctagttcacaagtaaaagatttttctgctggcaaattagttatagaatcttcactaacatacgttagtgttccaaaagataaatactctgtaccattttctttatgaagtttaatgtcggataaatcacgacctattacaccaggtatttctataaaagcatttgagttattctcatccattattttagtgttaactatataacctggagtttcatcagaaagactaaaacttgcttttacagagccaaacatatagctttgagaagtatatttttcatccactagatagtaacctttgccacttctttttttccacacttctttgacactatttgatatattgttgtcatctactttttgagctacatagtataaacttgctgtctgacctaatccagggacatcatcataagagctcatatttaaatatgtgatattatttttttcttttacaaattttaaacaactgttacccttttcagatacaaatctatcttgacctatgtatacgtatttatcttcaggtccattttctatataaggagaagatactgttaaagtaccattatcattaacatctacttttatcatatttgaagaagcataaagaccactattttcttttagagagctaggcattttaacttgttgtggcttactaaatgttttatcaggttttatttctttaattttacctttttcttttaatgcagatagtaagatttcttgtccaattatttcgttaagttgactacttccaccagaagaaagaactgcaactgccatattttcatctggaagaactataagattactgtggaataataaagagtctccaccttttgtaagagcttttaaattatactgattaaatggataagtgttgacacaatcccaccctaaaccatatccaagtatagaatcttctccttcaggccatagaccatttaaatattctttgttttccatagcttttactgaagcaggagaaagaataccatttgaatttttcataaatgtttgtgcaaatgtacatagattttctgcacttgaatataaaccacctgcacctatagcattaaggttatcttgtggaactgcatcttcccaataaggtacatatgcttttgctagttttgaactatcaaaactattttctgtagtttttgtattttgtaagttaagtggattatttatgtatttatcaagaaaattagtaaatgacataccagatactctttctactaaaatttcagctaaagtaaatccatcattacaataaacggaaaaagctcctggtttagcttttaatctttgtttttgtaattcttttaagaaattatcatgaccataagaatcattgtctgctaataaaatagtgtttttaaaactacttcccatcaaccctgatgaatgatttaataacattcttggagtgatttccttgtatctatcatcagccattttaaattcaggtatatactttacaacaggagtatctaaatttaattttccatcatcaaccaacttcataacagctgttgtagtaaacattttactgatagatgcgatactatacatattatccttatttaagtttttgttatcctgtttgctgtaaactccaccattaccagaaatctcaattttgccattatcaatcaaagcatattgagcacttacagcaccatactttgatagcaaagtttggattttctctttagcaagagctttagtttttgtgtaagattccgcgtttttactataatcatgtaattctatatcagaactttgatatttttcggaattatcttttgtattatcagcaaaagtaatatttggagcagcagtaaataacatactcaatactaatgtactagataataatttagagatcctttgcttaaacatattacattacctctttccctttttaataatttataattagcataacattcttaattattttaatcaacagattattatcaataaaaaaagcttttataagtatagctttttatataacagagaaaaatataaaaataatatttgttgttgtataaagaataaagggtataggtaatatataaataaaatggaggaattttagacatatgtataagaatataaataagaagcaacttaaagaaatgatgaaaaatgaaaaggatgttttattattagatgtaagaactaaagatgaatttaaggaatataaaatagaaaatgctataaatatatctttacaagatttaatcaataatatagatgaaatttacgattataaagataagaaagtagtagtttattgcagaagtggtcatagaagtgttactgcatgtaatttgttagctgaagaaggttttgagcatttatataatttaaattcaggaataattgattatatgagttaaataaggtaagttatacattaaatactatgtatagctctgtttattaagtaggaatatatctaaatatttataagataaatttaggaaagaacgaattttttcgcttttttctatgacagtttttgtagtaaatattagtttttaagttggaaaaaggtagtagctttttagctactaccttttaatatgaacttagaatattattaaaaaaatatatttaaagacagaattaattttttaatgaccagttaaattactatcgccaaatttatcattaaatggttttataactctatttataggtccttttagaagtacgtttaaacaaatagacagaatcataaatagtaatagaactagtatatctttagttagatttggagcatatataccaccaactgcttcccttgtagcacctattgcataggtaaatggcattatagggtttattctttggaagaatgtaggtgtaacttgtatagggaatgtaccaccagaagaaccaatctgaacgactaatagtactattgcaattgcttttcctacatttccaaatacagaaactaaagaatacactataaagttaaataccatactagtaaacataagcagaactatcaataaaattggatgttttgctgttactcctaacaataatatatctccagttcctattataaaaccttggacaagagctatacttaaaaaagtaagacctcttccaaagtaaatttcataaggtttatagtttccatgtacagatgtagacaatagtgctgaaataagtaatataccaacccatgtagaaagaacactataaaatggtgtcattgcagaaccataattttcaattggatataatttctctgttttcacctcaacaggttcttttaagaaattagactttgtcaatatatcactttcaagcaagctgactaattttttcatatcttcaccattactaattttgcttaaagtatcaatcaaatcatccaacattccttttgctaaaggaagtctttctcttatcaatgatatactttcctgtgcatttcctgaaagttttagagaagtagtaagtatttcttcaacctttggaagttttgcttctgccttatctaaaacagtaattatatcatttgctacttttatactgtttgcaaatatactatttataggttttgatatttttgagtcaaaattatttaaaatatttaaattaattcttccaataccatttgatagacttaaaacattattcaaagcacttatagatggttgttgtccagatataactttgtttttaatatcatttaatgttgatatagatgaatctattttattgctagagtcttcaagattatctattacatcatccaatctattatttgatgtaagttggtttaatttagttaaaaagtccaccaaagtatcgtttaaagattgcaaattagaaagtttttctgataaattatctatcaacttaggtacatcttcactgccactatttactgcatcaattaaatttaatgtaagagaagaagcagaagatgaaaggtcaaccattaaatttaagtcagacttaataagaggagaaagttcgtctaaattatcatttgtatcctctaagaatttttttaagtcacttgataatagttttgtatcattcagagtctttttaattgtaggtaaatcagatttaatatctttaactgtatcagataattttgaagtagcatcagaagctaaatccacagtcttatttatatggtcaaatctcttttgaaggtcaataagggaattttcaacttttgtcaattttggaagactgtgttcaattcctgcaccaactccgtttgatataccaagaacgatttcactaactgtttttactatagtctgattaacctgtagttgtattgtagaagcacctttatctgtaatctttggtgcaactgcatttattttttcattaacagtatagataatttcgccttttttaacatcatctgtaattaaagatgtcaaatcttttgtaaaattttttggaatcttaagtgatgcataataagtaccttttttaacaccttcaagagcagttttttcatctacaaactgccaacctaaactcttgttatctttgagttgttcaattaattggtctcctacattaatcttttgtcctgctatttcatttcctttatcttcatttgttactgctacaagcatattagcagtgcttccataagggtcccaagatgcctttatattgaaccaagcatacagagatggtaaaaaagcaagacctaaaactattacaagtacggcataattgccacgtatatcttttaggtcacttttaaaaatttctaatatattttttaaaccctttgaaggtcttaaattcttgatattattccagtttaaaatttcttttaaactattagtttttttcaaatgtctcacctcctaaaatattttgataaagaaaaaagttagatttataatcaattttaaattatattactttttacacaaatagtaaagttaaaattttgtcttaattttaatacatatatattatatataatagtatgctataaatatatataaatataggaaataaaaacaaataatttataaaatatatggtataaaaattaataataaatcaaatatttataattgatataatcaattaaattagccattatgatatacttttggtaatgagaaaattctatgaagggatgattgaatgaagtattttaaaaaatacataaaaaaatatatagtattatttctaacagcagtattttttttaacattggaagctttttgtgatttagctcaaccaactataatggcaaaaataatagatataggggtttcaaataagaacctagactacatactatcaacaggagctataatgataggtataacttttttaggtgcaatatttgcaataataagaagtgtaatctcggcaagagtttctcagcatttttcttatgatttaagacaggatgtatttgaaaagataaatacatactcattaaaacaaatagataaatttggtagagcttcgttaataacaagaattactaatgatatcaatcaaatgcaacaattcgttaatggaatgatgagagtttttataaagtcaccaataatgtgtataggaagtttaattatagctataaaattaaatttaaagatgtcaataattattctaattgcagttttaattatatttattataatattgcttaatatgaagatagggtatagattatttaaaaatgtacaagaaagtacagataaagtaaattcaaaattaagacagtttttaagtggaataaaagtagttaaactattttgtagatacgattatgagaaccaaagctttgaagagttaaatgatgaactttttaaaaatagtagaaaagctacaactatgatgtcattttttagaccgacaattacaataatcattaatgtttccataataataatattactgattggaaggcatttaatttattcaggagaaattaaaattgggattatagttgcttatgtaaactatatgactagaatattaacatctcttataatgatttcacatgtttttaatgtttttgttagggcaaaagcatcttatgagagaataagtgaggttttggttgatgagaatgaagaagtaattgagagagaagaaagtttagatgttggagaaaaagatttaaagtttgtaaattgtgatataatttttgaaaatgtagatttttcgtataacaaaaatacagatgaaaaaatattaaaaaacgtatcctttaaaatagaagaaggtcaaaatattggtgtgattggtcaaactggttcaggaaagacttctttagtaaatttaattcaaaaattatatataattgataaaggtgatattaagattggaggacgtagtatatacagtatttctgaagaaagtttaagggaaaaaataggtgtagtatttcaaaatagcagtgtgtttggaaaaagtatactagaaaatatagttatgggaaatgagggtataagtagagaagatgttataaaatcatgtgagatagcaaatgcaaatcaatttataactaaactcgaaaattcttatgatgaggttttatttcaaaggggtaaaaatttatcaggaggacagagacaaagaattactatagctagagctatagccaaaaaaccacaaatattaattcttgatgattgttttagtgcaatggatattaatacagagacaattataagaaagaatataaaagagtatataagtaatttaagagaaaaggaaagtaagaaatgtactgtaataactatttcacaaaagattagttctataattgactgtgataagattttagtcttggatgagggtgaggtggttggatttgctacacatgaagatttactggttagttctccaatttataaaaaaatttttgcgttgcagaatttagtaagtgaagatgtaaattaaggaggaagtatattgaacttaagtactggaaatcaaaaggtcagtagattaaagaaaaaagaaaagcctaaagattttaaaaaaacgtttaaaagaatttttatgtactttaaaaaagataagaagattactagatttatttttttgctagtaataattgattcaattatatcaactgtaataccatatactattggaaaggtagttgacataatagatatcgatacttattcaaaatccattttcttaaaaggaataattattttactttcattttatataattgagttttcagttaaactgtctaaggggatatgtacagctagattatctcaaagtatagttaaagaaatgagaagtaatttatttttaaaatttaaaaatctaccaataaccttttttgataaaagttctactggagatattatgagtagagtgacaaatgatgttgataatatcagtacaggaatatcaaattcattagtacagttaattacaggaatcttaaacatattgatgacttttattatgatgtttgtattaagcccaattttaacattttgcagtgtaatattaataccgatagtaatgtttgtgagtaattttattgcaaagagaactagagttttttttaagcaacaacaagttgagttgggaaaactaaatgcacatattgaagaaatgatatcaaacataaatgtagtaaaatcttttaattatgaaagaaaatctgtaaatgattttaaagaagtcaatgatagacttctaaatatttcccttaaatcgcaaatttacacttctcttttaatgcctattatgaatgtgattagtaatataggatttgcaactatatgtattataggaggtgttcttgcatctaaagatattataaccataggggttatagctagttttttaagttatgtaagacaattcacaagacctttaaatgaattagcaaatctatttaatacattactttcagccatagctggatgtgaaagagtttttgaaattatagatgaacaagaagagcaagaagtgcataacatgtttaaaagtgagattaacgataataaagatggtaatttaaactctcattttgtaaagggagaaattgagcttaaagatgtaagtttttcttatgattcaaaaaagaaaattttagataatataaacctaaaaatcaaagctggcacatcaaatgccatcataggagagacaggaagtggaaaaacaacgattataaatctaattacaaatttttatcatatagatgaaggaagtatatttttagatggtaaggatatatactctattaacagaaactatttgagaacttgttttggagtagttccacaagaaggttatatattcaatgatacagttatggaaaatataaggtatggaaatctggaggctactgatgaagaagttatatatgctagtaaaatagcaaatgcacataaatttatagttaaaatgcgtgaaggatatagtactgtattatcggataggggtgaagatttaagtgaaggtcaaaaacaattaataagtattgctagagcagtattaaaaaatgctccaatacttattttggatgaggctacaagtaacatagatatagcaacagaagctaaaattcaagaagcaataaataatttaacttatggaaagacaagtataattatagctcatagattaagtaccatatcaaattgtgataatataatagttttagaaaatggtagaattgtggaatcaggaaatcataaagaattgataaaattaaagggacattattatagaaacatattattgacacagggaaaataagtatttagaaaaaacttttaaaaaaattgtttaaaggtatatggtgcgggtatatatagactaacttaataaataaaaaatttaatttgatatataaaatttaggaggaaagtaattatgaagaaatttgtttgtacagtatgtggatatatacatgaaggagatgctgcaccagcacaatgtccagtatgtaaagttggagctgataaatttgaagaaatgaaaggcgaaaaaaattgggctgatgagcacagaataggagtagctcaaggtgtagatgaagaaataatcgaaggattaagagctaactttgttggtgagtgtacagaagtaggaatgtatttagcaatgagtagacaagctgatagagaaggttatccagaagtaggagaagcttataagagaatagctcttgaagaagctgaacatgctgctaaatttgcagaacttcttggagaagttgtagttgcagatacaaaagaaaacttaagagttagagttgatgctgagtatggtgcaactgatggaaaattaaaattagctaaaaaagctaaagaattaggactagatgctatacacgatacagtacatgaaatgtgtaaagatgaagctagacatggtaaagcattcttaggattattaaatagatattttggaaaataaatttaatataagttaagtagatttttaggagtatatcatttatgatttttaaaattataatgatatgctcctttttaatagttgtattttatattttttatagctataatcttgtaaatatttaaatcattataaatatagttttaatgaaattaattttttagttttattatctctgatttatgtaataaatagaattaatttgatttaaacatatatttatgataaaatatgagaaataaataagaatttaattagaaaggagtatttatagtgtttaaaactgtatttgaagataaagaatatgttttattatgtaagaattattctaaaagtgatggagtaaaagcaatatttatttatttgatatctatgttactattgtttttccaaggttatttgtatacaacaaatttaagttcaacaattttaactaactcacaaatgatattgtcaatcttgattttacttatagggctgggatttgtactactttcgaaggaaaaactaaatacgattgggattacaatgtgaaatttaaataaaagtcttttgtatggagttattggtgctactgtactcgtaattttcgttattttaacagctggaattatgcaaggaaaaaaagttgattttcaattacctactgtttttatgattgttacatttattgtttctgctatttcagaagaaattgtttttagagggtatattcaaacaaggttaactggattaataaaaaatagtgtactttcatcttgtattaatgcttttctttttctatctacacattaccctgtaaaatggatttcaagtggagatttttcatttgcaattctatctggattttatgtgatatgccttatattacttaacttttcatgtgatttagtatatcgaaaaactaactgtctgtggggggcatggctactgcatatcttgtataacattggcacaggagtgctgatttttactacttagtcaattttactttgcagaaagtttatcgtaagaaacggattattttataagtcaaattttagagctagtaaattgacatacttaaaataatttaaactagatgtaaaaaatatcgacaggtggtggacaatctgattaagtatatacataaaagtaatatagctattgttgtactgcatgaaatttatggagttaataattttataaaagatgtttgtcaaaagtattataaaggtgggtatgatgtgttttgtccagaactcttaggagaaaaaagagttttttcatacttaaaagctcaagaagcatatgatttttttataaataatgttaagtttgatatttataaaaaagtagaaaaacttataaatggtttaaaatcggagtataaacatgtatttgtagttgggtatagtataggtgcaactattgcatggagatgtagtgaaaactctttgtgtgatggtataatttgttgttatggctcccgaattagagattatatggatgtaattccaacatgtcctattttgctagtgtttgcaaaatacgattcattcgatgttgattatgtttcttctcaactttctagaaggcaaaatattcaaattgaaattttagacgcaaatcatggttttattgatacatactcaaaaaactattctaatgctcaaacagaagtttttaatattaaagaaaaaaactttctatctaaatgtttaggctaatatgttttattataaaatatagaaaatttaatcaatttgaaaaacataatgacactactaatgttaaaaaatattagtagtgtcattatattttttgagatagagatagtcagtagaatcatagaattaattatgtttttatgattgtattagattaatatttaaattacattgaaaagaaaaaaatcattactatagaataatatctttatcaaaagaacattcttatgcagaatatggttatgagtatctaagagaaatctcaaaatatataggatagcagtatgaatttttatagattttattaatacaataaatcaaatgagaaaaaaaatcaaaagaatacaataatcacttgcaaaaaatatgctattgtgatagacttaaatcaaaattaggaattgtaagaataaggaaaaagataagtaattattttaacgagtcaaaatttaagaaattgtgatttatatataagatagaggttgtttgtaaatttaaattggttgaagaggaggaatattatatgatgccattgatattatcaaatacaggtgaagaagtagttataaagaaaatttcgggaagtgataagacgaggacttttttaaatagtataggttttgtagtaggtacaaatgttaaaatagtttctaagatagatggtaacttaataatagacgtaaaagatactagagttgcattagataaaaaaatggcaagtagaataataatatagggaggtaatgacatgaacagactgaaggatattaagtgtggagagactgtaaaagtcaaaaagttagaaggagaaggagctacacgaagacgtataatggatatggggattacaagaggtgttaatatatttataagaaaagtagctcctcttggtgatccaattgaggtaacagtcagagattatgaactatcaattcgtaagtcagatgcagaaaaaattattgtggaataataaagattaattagagtagggttaatgtaattatataatgagaatgattttctgtatcacaaacagtgatgtatttaaataataatggagggaatggaaatgtcaataaaaataggtctcataggaaatcctaactgtggtaagacaacaatgttcaatgggcttacaggctcgtcgcaatatgttggtaactggccaggagtaacagttgaaaaaaaaggtggaaaattaaaaggaaataaagatgtggaaatagtagatttaccaggtatttattctttatctccatatacattagaagaagtagttacacgtaattttatgctagatgataagccggatgcagtaataaatattgtagacgcatcaaatatagagagaaatttatatcttacaactcaagttttagagctaggtataccgaccattatagctcttaatatgatggatattgtaaataagaatggtgataagataaatattaaagaactatctgaagttataggttgcccagtggtagaagtaacagcagttaaaggtcaaggaattatggaggctgctgaaaaggcagttgaacttgcaagtagtaacaataaattaaatttcaaattaccttttgttgatgaaagtaaggacgcaatagaaaaaattgaaaaaataatagaagaaaagactccatatatagatgtagaaacacgctggttagctataaagctatttgagagagatgaaaatgttatacaaaaacttgatatttctaaaacaatattgaatagtattgaagaaataactagaaattgtgaagatgaattggatgatgatagtgaaagtataataacagccaatcgttatgaatttattagttcaataatttcaagtataataaagaagaatcgaaaaggtaaggaaactgtatcagataagatagataagattgtaacaaatcgtatactagcattacctatttttgcacttataatgtggggagtttactatatagcagtaagttcattgggtactatagcaactgattggacaaatgatgtactgtttggagaaattattcaaggcaatgtaagtaattttctagcttctttaaatgtagcagagtggttacaaggacttgtagttgatggtctaattggtggagttggagcagtactaggatttgtaccacaaatcatgcttttattcttattattgtcaatattagaagattgtgggtatatgtcacgtgtagcttttataatggatagaattttccgtaagtttggtctttcaggaaaatcatttataccaatgcttataagttcaggttgtggagttccaggagttatgtcaactcgtactatagagaatgatagagatagaaaaatgactattatgttaactacattcattccatgtggagctaagattccaataatagcattatttgcaggggcattatttggaggtgcttcatgggtagctccatcaatgtatttcttaggtattgcaatgataatcatttgtggaattatattaaagaaaactagtttatttgcaggagaaccatctccatttgttatggaattacctcaatatcatgttccaagtgcaaaaggtgttttaatacatatgtgggatagaggaaaagcatttataatcaaagcaggaacaattatatttgttgcttgtggagtaatctggttcttacaatcatttaattggtcattacaaatggtagatgctggagatagtatattagctagcttaggaaatatagttgcaccaatatttgctcctcttggatttggaaattggcaatcatcagtagcaacagttacaggtctagtagctaaggaaaatgtagttggaacatttggagttttatttggtatatcagatgcaacagagcaagacccaacacttcttgcttcagttgcaagtatgtttacagtagctagtgcgtttgcatttatggcatttaatatgctttgtgcaccttgttttgcagctattggagccataaaaagagaaatgggttcatggaaatggacatggattacattaggattccaaactttaacagcgtatataattgctcttcttataaatcaagttggaagtttagttttaggtactggaggaagtattgctggggcaataatatctatatttatagcagtagcagtagtctttgtagttttaacttattcaaataaaaatatgaaaaaagaaaaaatgggtaaattaagttatatgaaaaattaattcatataaataaggagtgatgaatatggctacatttattatagcagctattgtagtagtattaatggcactagctgtaatgtatatggttaaaaattcaaaaaagaatggtagcagttgtggatgtggttgttctggatgctcaagtagtaagagttgtcatagcgctaagagataaataggataagagcctgataaaaagttaaattgctttattatcaggttcttattttttatataaataacaaatttcatatttgaagtaggttagactatgctgtaattttactgtataattatatataaatatatgattaggagggattattgctaaattaagcaatataagtgaatattatgtttaaatttgatgttacaaacgagcttatgtgtatagcaaggggaagtggtaaattttttgcaaaaaaaggtgctatggtagcctttaaaggaaattttaattttgaaaaattgctgttaggtccaagtaatggcggtggattgggaagagcattattaggtcatgttcagaggtcattgacaggagaacaaatgccaataatggtggttgaaggtgaaggtgaaatttacctagctcaaaatgcttaccatgtagatgtaatatcaattgacccaggtgattccatttatgttgagagtgaaaacttattggcattttctgaacaattaaattacagtgtaaaattgattggttcaggggtaatatctcaaaaaggtctttttactacacatttagtaaataaaacaggtcaaaatcaagatgttgctataataacagatggtaatcctctaattcttgaaggaccttgttgtgttgacccagatgcattagtagcttggactggaagagaaccatatcctaaagtatcaaaactatcatggaagacttttattggtcagacttcaggagaatcttatcatatggaatttgttgaacctggacaaatagtcattatacaaccatctgaaagattgtctggcttaaaaacagattctacaccttctgatagaatgagttcaggtggattaagacttggcatagattaaatcttatgatatagcttaattattatttaagatattaaaaaataaaaagggtagcagggatagatatgttaaaaggagttttatatgtttgagaaaattcataaaaggtttaaaggatattatatttttttaataattttaattttatggaagatagtatgtgttttgggtatatggagtagctatattctgcctcctcctgaaatagtcttagatacttttataaaaatgatatatgacggttctattttcttaaatgtttatgccagtgtaagaaggatattaataggttttttaataagttcattgatggctataccacttggagttgtatttggagtaaataaaaaaatgtatgaatatttcaaaccactatttgaatttatgcgaagtacacctccactagctttggtgccaatgcttattttatggtttggtataggtgaagaatctaaaattataattattattttggcatccttttttccaatatttttaaatacattgaaaggtataaaaaattgtgacaataaattaatagaagtaggtaaatcttttaatttatctaaaaagagaattttttataaaataataatccctaattctatgctggatattgttgttggacttagtttagggcttgggtatagttttagggctataattggagcagagcttattgcagcttcttcaggactaggatatttgatttctgatggaaaagatatgtctagaactgatgttgtattggtaggaatttttgttattggatttttaggtatactttcagattatctattttcaaagataataacaaaatttagcaaagggaagcaggttgatttaaatggttagaagtggatttttgctagagaatatatataagaaatatttagttgataataaagagcatttagttcttgataatatatctttaaatatatctagtgaagagataactgttatattaggtgaaagtggatgtgggaaaacaacgctacttagaattttagcagggcttgaaaatgctactagtggaaacatatatttttttaataatgataaaaagtgtactccaaaagtaggaatggtatttcaagaaagtagacttatgccatggctgaatgtaagtgaaaatatacttttacatactgaaaaagataatagaaataaagttgatttagacaagtatttaaaaatgatgaagcttgaaaagtttaaaaactcatatccaaatgaattatcaggaggaatggctcacagagtaagtatagcaagagcactttccttcaatcccgatattttgctgatggacgaaccatttgcagcgctagattacttcacaagaagaaaaatgcaaaaagaagttgtaaatatccataaaaatactaaaaaaggtgtagtatttgtaactcacaatattgaagaagctatggaaatagcaaagaaaataattgtttttagtaaaaataaaaggattaaacaatttagtgtcgaagatgaatataatagagatttaactaaaaactattatataaacttgaaaaaagaaatattaagggaattgggggagttttaattgattaaaagaaacaaaaagattttagcagtaatgacatctttaataatggtgttggttgggactgtaggatgttcaacaacaaatgataagaaagatgaacctgcaaaaaaagaggctagtttacctaaggaaataaatttaacttatgtaaaatcaccacttaatgttcctagtatattagaaaaaaaggatgatttatttggaaaggaatttaaaaaggacaatataaaagtcaacttccatgaattgacaacaggaccagagcaaactcaagcattagcagcaggtgagctagactttttacatgcattaggaggaacgtctgcaataatagctgcatcaaatggtgttggtcttaaaattacgaatatttatagccgttcaccaaaaggatatatgcttataactaataatgataatattaaatctataaaagacttaaaaggtaaaaaaattgtaggtccaaaagggactatacttcatcaactgttgattgctgcacttgctaaagaaggctatactatagatgatgttgaatatgtaaatatggatattcctagtgctgcttctgcattagaaagtaaaagtgctgatgtagcaatgcttgcaggtccagtggcattgaaaacgataaattcaggtgccaaaatgattgtaaatggagaaggattagtaagtggaataatagttactgctgtaagtgatgactttgctgaaaaatatcctgaattagtaaaaagatttatgaaggttcatgaagaaactttaaaatatatgaatgaaaacaaggatgaagtgatggatgttgtatctaaagaagttggtttatctttagatgaaacaaaagaaatgtattcttggtatgactttagttctaaaataacggacaaggatataaaagaattagaagatacacaggaatttttgatgtctaatggaatgcaacaaaagaaaataaatattaaagatatgttgtacaatcaaaattagaatactttaaaatattaaagtggaaaatacacccttatttattatggaaactgtatggtaaaagagggtgtatttttattattatacaaaaatacaattaaaaacaacttactattttatctacacttatgtagtctagtaattttctcattttcttacggtgaagtaaaaactttgaatatgtgtcctcggattgttttgtgtcaccataaactttccaatatttaatcatagaaacttcataattactatatcccataaatccaatcacatctttaagaggatatcctaaaaaaatacctatttcatcaggaaaaacatcactcttaagtttatttactaaatgctctaaataagcattaacattcgtattttgtttgtatcctaaaaactttaaaaagtttactgtttttttacattttaatttttctgataatgcttttttatttacaaataagatttttaatccctttttttctttatcaataactataaaatctattttcttacatttatatagatatttataaatatcattaattttttcctctctatttacatcagtaaacgaaatatttattatttcagcaggtttagagcctaaaaagactggacctaaaacctctaaaagccattttatatatgatgattcaattttatttttacaacaaaattgtgaattacaacaagacataaaagataacctccttcaaatgaaaattaatatcaagtaattagattatactatgaatgataatcaatatcaataataaaattataatttttttatttaattatttattcattatgatttccaaaaaaataaattataacttgtttaattttagtaaataaaaaataaaaatatagaaatactaaattaagaaagaaaattattaaaattttttgtagtacaaaacatctaggagggtaataaaaatgaaattaaaaagaactttatttgtaggattagcattagtattagctataggaataactgcatgtgctagggataatgaaaaaccaaatgaaaatgcaggaaaaaatcctaatgaatctgtaaataataatgaaggatatatgaattattattcaacaagttataatgattatatagcaggtctaaatagatattctatttatgatactccagaaagtataaacaatcagtttaaagataaagaatatccaggaaatgaaaaatatctaagtgatgtaaaggctgcatataaagatagtagagataaaatacaatcatttgtaacatctcttaaaaaagacggtaaaacagaagatacagagttaaagagaatgaatgatgacctaatagctgaaggggaaagattagtaaaagatatagatgagagaatagaaaaattagataaggtatctgatgaagatatgaaaaaaggtcaaaatgattttatgaaactagttcatggaactgaagatgttggaaacgatattggtagtggttttagaaaaatgataaaagatatgaatgatagattgggaataacaggaaataataaaaaataatagagtaaatagttttaaagttagaaataaatatttgaaatatagcgaagccttgtaattaatatattttttggcttcgcttttttgtatgttatcaagatactaatttttatcttgtaacctcatattttcattatagtttatttagaggttatttttttatgtttttacttgttttttctctttttaaatttttgttttgcaaaattgtaagattcttctattaaagttttaaagttctcaaatgtcttttcagtagggcttaggacgcatatccatcccatccatgagtagataggatgtggcatgattgtgtccaattttgtaaaatcaaaatccatatcaactatttgccctacacctggacgctttggaatatatccaaacatttcaataaaagtttctttttttaatcctatattcacacggtatacatttggacgactaaccaacgaacctttatcatgattactgtctttttctttaatggtaagaacatatacccctcgctttaaaacaccattaggattgtagtaaattgctcgttccccccaactatccattagtacaacatcatctaagtttgatagacaataattgagaatatcatcagccttaatagtatcattttccataaaatatcaatcccttctttctttaatattattattgctttagatgcaagaatatcttatcatataatggtgacaattattgtcactatatttaaattaggagtatgaatatgtcaagagctgagcgtttaattgaactgatgataacaataaatgcaaaaagaagttttacagcgggagagctagcagaagaattttctgtatcaaaacgtactatactaagagatttacaggtattggaaagtgttggatttccactatattcaaaagttggagcggctggaggatatcatgtacttaaagaacgtatacttccaccaattacattttcagagagtgaggtaaaatctatattctttgcatatcagtcactagagtattataatgatttaccatttgagcaagaaactatttctgttttaaagaaatttttaaattgtataccaaatgatattcaatataatattgagaatatgagacgtaaacttgttttttggacaccagataggcattgctcaacaccattattgaaggaattgtttaatatagtaatgaatgaatttacaattaaaattgaatattcatcaaagcaaaaaaatagtatacgtaccattgttcctattggtttgtatgctatgaatggactttggtattgtccagcttactgtataaaatcagaatctgttaaggaatttcgtgcagacagaattgtgaagattttgagtatagaaaacttatcaaataagaaatataaggttttatcttctatacatgattatcttaagaatatggaagtaggtacagattatcatattaaaattaatctgacagatgagggagtaaaacgttgtgaaacagaatttttgttggcaagaggattgaaaattttgtctaagggtggatacatagatatgtatataccaaaatctacacttaattgggtggctgaatattttttaacttttggaaaaaatgctacaataatagaacctatagaacttaaacatttgattaaaaaatagctacgcacacttgtgactttagtcatgagttagtagctaaattagtcagcatatagggaaacttatatgtagagataggataacacctatccaatactacttgaattgctaaaaacccctaaagctaaccaaactaaaacataaggatgaaataaacctaagtgtgaaagttacgaaagtagaaaaaattggttagatggtataaggttaaatcctaagtactttaaaatgggcaatcagcaggtaagctccgaataggagaaacttcaacgactattcctcttgagggaagtacactacaagttatcggtagtggaagtgggtagaccttagcggataatgccgaaggataagatatagtctgtgcttgcatgaaagtgtaagaagttcataagagaactgcataggtactagcgaacttatgtgaacgacaacctcaaaaatgataaaagttaagacttacggttcttatatatgttatttaaaaataaatataaaaaaccttcaaaatacttgttttaagtaattgaatattttaatattatgataggtgatgaaaaatggaagttactcatggtagaggatatgcatatagtatgtcaaatatagaaataatcagaaaaaacaagtaaagtgaggtgatagtagtggaaaaagcttataagtttagaatgtatccaaataaaaaacagcaagagttaattaacaaaacttttggatgttgtagatttgtatataataagtatcttgctaaaagaatagaagtttataaaaacaataaagaaacttttacttataaacagtgtagttctgatttgaccaacttaaaaaaagaattaaagtggcttaaagaacctgacaaattttcactacaaaacgccttaagagatttagataatgcatataaaaaattctttaaagaaaaagtaggatttcctaaatttaaatcaaagaaaattaatagattttcatataaaactaactttacaaatggaaacattatgtattgtggtcaacatataaaactacctaaacttggtatggttaagataagggataaacaagtacctaaagggagaatacttaatgctactatatctaaagaaccaagtggtagatattatgtatcattatgctgtactgatgtagatattgaagtatttgaaaatactaataatcagataggtttagatttaggaattaaagaattttgtatctcaagttgtggagaatttatagaaaatcctaagtatattaagaagtcattaaacaaacttgctaaattacaaagagaattatcgagaaagacaatcggtagtttaaatagaaataaagcaagattaaaagttgcaagacttcaagaacatatagctaatcaaagaaatgattttctacaaaaactatctactaaattaataaaagagaacgatattatttgcatagaagatttacaagtaaagaatatgattaaaaatcgtagactatctcgcttaatttctgatgtatcatggtcagaatttgttcgtcaattagaatacaaggctaattggtatggtagaaaaattgtaaaggtaggtaaattctttgcaagttcacaaatatgcaataaatgtgggtataaaaacgaggaagtgaaggacttaaatataagagaatggatttgtcctagttgtaatgaaactcacaatagagatataaatgcaagtataaatatattaaaagaaggattaagactaataacaattcaaaataaataacttatgtaagaaccgtaggaactacggggatagcctgtggagaattagtaagacatattttagtatgcaaaattctatgaagcaggaaccctgtgactttagtcatgggaggttcagaaagtctaaagtattagagctatataatcatcattgtatttaaattattttatttaatagtaggatagagtttggataaaatgttaattttcttaatttactttacagatgatttagatagattgatgttatttaatttatttcttataatgatgttctatagttatatagacattaaaatataaagtgttaggagctagaaaactaattaaaaatagttaattaacgataataaaaaataaaaaatttaaataaatttattgacaaatactattaatgaatatatcatatataacatagcaacaaatgataatagaattgaattaaataacgtcttatcaagagtggtggagggactggccctttgaaacccggcaaccagtatattttatatacattggtgctaaatcctgcaactaatatagttgatagatgagtataaatagctttctaagcctgagtttatactcgggcttttattttgttgtaatacataagagaggataaacataaaaactgagcagaatatatgggaggaaattttatgattagcataaaaaatgttaataagtattatggaaagattcaagtgcttaaagatgtaagtattgaaatagaatctggagaaatttttggaataataggtcatagtggtgcagggaaatcaacactactgagatgtataaacggattagaagaataccaagaaggcagtgtacttgtttctgataaagaagtaaagtcattgaatgaaaagcaaatgagagatttaagaaaagagttaggaatgatttttcaacacttttcattgcttgaaagaaaaactgtatttgataatgtagcattgccattagaatgttttggatactcaaaggcagaaattaaaaaaagagttttagagttattagaagtagttggaatatctgaaaagaaaaatgataaacccagaaatctaagtggcggacaaaaacaaagggttgcaattgctagagctttagcactaaacccacaagtacttctttgtgatgaagcaacttcagcattagacccaaatactacaaagtcaattctttcattgcttgaagatataaataaaaaattgggaataacaataatagttgtaactcatcaaatggaagttataaagcagatttgtggaagagtagcaataatggaaaatggagaagtattagaggtaggagatacagaagaaatattcttaagaaatactaaaggacttagaaaattaataggtgaagaaagtataatattgccaaaaggaacaaatataaagatactattccctaaagatatttctaatgaagctattattacgactatggcaagagaactaaatatagatgtgtctataatatttgggaaattagaacaatttaaagatgatattttaggttcacttattataaacatttcagataaaagtggagagcacgtaaaacaatatctaactagtaagggcataagatgggaggaaatgataaatgaatagtttaattgactttttaacaacactatttccaaatgcattgttacaaactttgtatatggttatagtaccaactatagtggcaacaatattaggatttatattagcaatcatattagtagttacaaaaccagatggattaaaaccaaatagcacaataaatagtgcattaggatttatagtaaatatatttagaagtttcccatttatgatacttatagttgcaatgattccaataactagattaatcgttggaacaagtataggggaaactgctgcaatagtgccaataactattggggcagcaccgtttatcgctagaattatagaaagctcattaaatgaagttgataaaggattgatagaagcagcaaaatcttttggagctacaaaaagacaaatagtatttaaagttatgataaaggaagctatgccttcaatagtatctggaattacattatcaataatatctatacttggttatacagctatggcaggtgcagtaggagctggaggattaggtaatatagcacttatttatggatatcaaagatttgatacagcagtaatggtatatactgtaatagcacttataatattagttcagataatccagggagtaggaaatctggcttataagaaactaaaataaattaattataaacattttaaagagggggagtaaaaatgaaattaaagaaattattatcagtagcattggtgtcagcaatagcaatatcagcagtaggttgttcaaacaaagaggataaaaaaatactagtaggagcttcatcaaatccacatgcaaagatattggaagttgcaaaacctttgttaaaagaaaaaggatatgatttagaagtaaaaatatttgatgattatgtacttccaaatacagctttagatgaagggtctttggatgctaacttctttcaacatattccatttttagaggaaactgtgaaggagaaaggatataaacttacttatacatctaaagttcatatagagccaatgggattctattcagaaaaagttaagtcattagatgaattaaaagatggagctgttatagctgtgccaaatgatgcaactaatggagctagagcacttaaattattagcaaaaaataaattgatagaagtaaaagatggagagcttataactaaaaaagatataactaaaaatcctaaaaatatagtaataaaagaaatgaatgcagagcaattaccaacagtattaaaagatgttgacggagcagtaataaattctaattatgctttaacagctaacttaaatcctactaaggatgcaatagtaatagaatcaagtgattctccatatgtaaatataatagcttgtagagaaaataataaagatagtgataagattaaggctttatcagaggctatgaatagtaaagaagttaaaaaatttatacaagatgaatataaaggaagtatagttccagctttttaaactgaatatacaaaatctacaaaatgagtaaaattaaaaatatttactcatttttttttataactagaaagtgacaaattttttggaagaattgtggtaacatatttataggtaaaactatataaaaatgaagaagtggtggggaatatggaatctaaaggaactttaagtaagaataaggtctatatactagctaatgggttatttttggttattgcacttttaaatataaatttgtatacagtttctataaatatgtatagaataattttactttggatatttggatattctatagtttatataagtagctttaaaacagatgaatttataaatatattgaaagtagggtgtcttgtattagtttttgtaagtattttaggagtagtaaatttaaaaattcaaaaattccaaattgtattgcttaacttaagcataattaatatgtctacttttatatacttaaccatttctaaagtaaaaaaactaagaataagcccaatactaattttttatagtgcttttgtgatattagattactttataagaaatatttttagtgatattaactggaatatgattattatattaattaatatttgtatatctatgtttaatttactatatttgttgaataaacttgatagtaacattgagcactataagttaataaaagatttaacatattttgttttttttacaactattatatgttttgtagcaatttctaagattaatatagtagattcagatagattaataggagtaatatatttactattatgtaaccatacttattatgtatatgtatacagtcttaataatagagtagtgtatccatattatgaacttgattcaatcaataaaaaattaagtaaaaagtcagagcaattaggaaagataaatttagcaatagaaaaggatatgattatacaaagaacattaaaaaactacatagaccagagaaaagaattacttagacaagctctggatacaataccaaatgtatggatagtaacagactatgattttaatataagttacacaaataataaatttaaagatgaattttcaaaggatatgaataattattataaaatattaacttttataaaggaagatgaaaaagttgctgaaaaattgaagaaatttgataacgatataagtataattgataaactggtagagttaaatgataaaatttatttgttaagtttaagtaataataaagatgaaagcaattacttaataagtttaaatgatattacaaatgaaatcaaaatagatgaagaaataagaaatataaataaagactatgaaaacattatactaaatattccatctcctatacttgtaagaagtgctgaaggtggcataaagaagaataaggtaataagtataaataaaaaatatgaaaagagttttaaatgtgtttcaagtgatttagtcgatatgacattagaacaatattttgaaacttttaacatagatttctttgacaataggaaatttaaaagattaaatctaacacaagaaaagaaagctgaaatagtaagttacaatgacacagcaaactgtatagttaattttgtgatgtctgactcagaaggtgaagaacatgttgaagaagttagagttggagactattggtcagataataaactctttaaattgcttacatttagagatataactaaagagataaatattcttagaacagtaaatgaacaaaaaataatatatgaaaaattacttgatgttataccagaggctatttttcttgaggatttaagtacatcaagagtactatatacaaatagagcctttagagagttgttcggaatttctagtgatgtattaggagttacaacacaaaaatatagaaatatattagtaaaaaaatacataaacaatttaaatataggagaaagagagaagagtatccatatagtaaatgaaaataatcacattaaagaagtaaaaatgatatcaagaacattatactttggacagaaaagaagtagagtgagaattattaaagatttaagtgtgcaaagagagtctgaaagacttaaaaaagcattaataaaacaaagacagtatgaccaaatgaagatggagttttatgctaatatatctcatgaacttaagacacctttaaataatatatatagttcagttcaacttattgaaaacctttataaaaaaggaaaaataattgattttcaggatatactaaaagaacatataaaaataactaaacaaaatatgtttagattattgagattaatagataatataataaatatttctcaagttaagtcagacatatataagattaaagcagttaattttgatattattgacataacagaaagaatagttacatctattagtagttatgctaagtctaaaggaatagatttaatttttgatacggatgaagaaactgttatggtagggcttgacccagaatctatagaaagaataatactaaatatattatcaaatgctataaaatttactttagaaggaggagaaatccttgtaggtatatataaaaaagacgaaacagtagagataattataaaagatactggagtgggcatagacaaagaaaaattaaatgatatatttaatcgatttaaacaaattgaaaacagtggtatatcaaatgaatttggaagtggtataggtttatgccttacaaaatcattgattgaaattcaaaatgggaagatttacatagatagtaaggtaggagaaggaactaatgtaaaagttatattcccaattaaagaggttgttgaagaagtatatgataattcaaattacaatgataatattgaaaagtttgagatagaattttttgatatatataaataataaatggctaaatttattgtttatatatatcacattaataagagttaattttatttattactttagttgtatttgatgcgttttaaataaattttatgaggtgaaattttggaaaaggatttttttagaaaaaatggaattgatttagccaaatcaatattaggtaaatatctaataaggaaatatgaaaataaagtaattgttaccaaaatcatagagacagaagcatacatgggtgtaaatgataaaggagcacatgtatatggcaataaaaagacagatagaactaagccattatatttagatggtggacatatatatgtttatttaatttatggtatgtataattgcttaaatttatctgcaaatatagaaaatgtgccagagtgtgtattaataagaggggtagagcctataacttctttagatgagatatctatgaatagatacaacaaagcttacactgagttgagtaaatatcaagtaaaaaatattactaacggaccaggaaaactttgcaaagctttaaaaatagatagaagtctaaatagtaagagtataatgggtgaagaattatatataagtgatttttattatgatgataaaggaaaaaaagtatttagtaaagatgagttagatataaaaactagtaaacgtataaatatagattatgcagaagaagcaaaagattttttatggcgtttttatatagaataagtttttatataggtaagatatgtatctataggaaggtattttataggtatgtatcttatttttttatagaatttttagtttgataaaaataactttatagaattacaaacatatttaataaatttataattattttaatgatataaagaaagatatattttggcgaaatgagctataaaaattaatttttttgtgtattttattaaaaattataaaatttgtatagataattagtttattttataagtaataaattaattattaaagaatgaagaaattttgacaaaaaaagaaattatatttagaatatagatatatttacaagaatcttattgagatgatattattttttatcataagcaattcttgttaaatgagaaattagaaaataaaatataaatctacataaaatacttcaataactcttgacaatctaaaaaatgacaaggctgtatataaaaaatatatatagtattaaactctaaaataaaatatgttgtagagtaaaaaaagacattgaatagatatcattaaattgtaaaattatgttataattgtactaaaggatgtaataatgtgtagaaataataatataatttgaaattttaataattaaaccagaagaagactacatgaacaacttaagttttattatataaagagtaaatgcttataaaaaatgtatctttagttggcaagattaaatatacatatgtgaaaaataaatcgtaaataatcgtaaaaatgtagacaaaaaaagattgataaattatagtaatacttataaaaattttttttaaatgaaataaagataggttcagtacctatatttatatttttgtatttatattatgaaaaaattaaaattatttaggggtgatggttttgaataaggacataggagcaaaaataaagcaactcagaactcaaaagcaaatgacgctgaaggatatgagtgaaaaaacaaacttgtcaattggttttttatcacaacttgaaagaggattaacaagtgtggcaacagattccttaggaaaaatagcaagtgtactagatgtagaattaacttacttttttatgaagccaaaagagcataaaagagctgtattaagaagttatgaaaaagaagtatttgatgtagaaaactcaacatttatacattatcatttatcatctagtttaaaggaaaaaacaatgctaccaagattaattgaaattcttccaagtaagagtagtgaggaaatttgttgttacgtacatgaaggtgaggaatttgtgtatgtattagagggtactcttacagtgtttttgggagatgaacaaatagaaatgtatccaggagacacaatacactataatagtgaaaagaacaatcataattgggtcaactatactaataaggtagtgaaaattttggtagtaagtataccaaatccatttgaaaagtctgatgcagttaaagaagcttaaattttaacgattactattagtcaataaggaggtactaaagtgaaaaaaattggattcataggtgcaggaaatatggcaagcgctatgatagggggaatagtaaattcaaaattagttgaacctaatatggttatagcatcagcatatagtcaaggaactctcgatagaatagatgcaaattttggaataaatactacaaaagactcgaaggaagtaactagaacctctgatatagtaattgtagctgttaaaccagatatatatgatgatattttggaagagataaaagactttatagatgacaataaaattatagttacaatagcagcaggaaaatctataaaggatatagagtcaattataggagaagataaaaaaatagttagaactatgccaaatactccagctcttgtaaatgaagccatgtcttctctttctataaataaaaatataaacaatgaagacttagaagcagttacagaagtatttaattcttttggaaatactgaggtagtaccagagtatcttatagaagctgtaattggtgcaagtggttctgcaccagcatatgtatttttatttatagaagctatagcagatgcagcagtaattgcaggaatgccaagaccacaagcatataagtttgcatcacaggctgttatgggttctgcaaaaatggtacttgagacaggaaaacatcctggtgaattaaaagatatggtatgttcacctggtggaactactatagaagcagttaaagtacttgaagaagaaggttttagagcttctgtgataaaagcaatatgtgcatgtatagaaaaatctaaaaaaatgagtgagtaataaaaatttattgtaaataaagagaattgccttttatagaaaatttccattttaggcaattctttttatttgtttaatttctaaaataagcctgaaagccaattttttattttttcaaagaaaccaactgagtcattattatttgattgattttctgaattatttgttgtgttgttttcatttgtttgagaactatcgttattttcattattacttgaagtatcattttttgagctatttgtatcactatcattgttagaattagtattattttgtggatttatttgaacaccttctgtagaatttattacagcatcagagccaagagactcatcattagtgttatttaagattcccaaatcttttttatctccgcctgagaataaaccagagaaccagtctcctattccactaaaccatccaccaatagtatctagtataccagaacccttaacactttcacctaatttctttaattgttcatttacattatctgatacattatctagtgtatttttcatgctattgtaatcataattttggtcagctatttttttcattacacctttaatttgttctttttgttctggtgtaatagtaatattgtaattatttacaacattatttattgtatttgctatttgattggtatcttttgtaccattctttacaatttctgtttttatatcattcattacacctgttgctttttcttgccctatatcatctcctaagtcacctgtaactaccaattcttcagaagcaatttctttcttagtttcatcaagtttctttcctgaagcatcctcaaatgctttcatgattcctgtcaatgctccagtaccacttacaggatatggagcagcagcaataacatttgcatcttcaagaccagctgttgtaagggttgaagcaatcattgaactagttacccaagttaagtttgctgttttaacattaattccatttccttttttagtaggttcaacgtatgagcaagagatagtaacttttccaagttgaccctctgttgcaacaccttgtaaatactgtctttcttctgcatttgttacatctaaaactaagacttggtctttttttactccaaagtaattaagcatttgctgcttttgagactctgataagttagctccaagtgtaactacatttgtaccatctgcataagaaaggttcatactcccaagtacaagcatagtagacacaacaatagaactaatttgttttttaaacttcataatattcctcctagatttaacatacattacattttcaatctatttttttattaatatattgaataaaaatatgtgctacatttctattatactaaatataaactattttttaaatcaatgcgattacaactttgtaataaaaaagggaatataaggaagataataaaaaaataatttttgtaagagattgaaaaaacaattaatgtagtatactataatatagaaatgattatgataatgttatagaatcggaaggagaaaaataaatgtcaaaagaattagtaaaagatagagtaataaaatatttaatagaagatttattagtccctcaagatatgattgatacaaatgttgagttggcagaatttgaagaaggtgcagaaggagttttagatattgttgtaaatgttaaagatgaagaagattattatgcacctgtaatgatagtgcaatgtttagatgaagatgtagagttagaaggagaagttttacaaaaacaaatagaatttttagaagaagtggataatataactatgtcaggtagattggttttaactaatggggatgctatgatgtacgctgattggagaggggaagaatacgatactgaggcagctcttccaacttatgatataatggtaaaagagtttcatgaaatggaacaacaggcaaaagatttagaagaacatcatcaccatgataaaaattgtggatgtggatgtaatcatcatcatgaaaattaaatattgagcatatatataaaaaaagactgtttagtaaacagtctttttttagacatatatcattcaaaaaactaagaatataacaacatataataaaataaattatatatataaggaggatattgcggttagaagtagaataatattataggtatagtttttataaatttgtatacataatatacaaaacaattcatttaaagaatgggatattatgtaattgtagattatgtaggtttaaattatttatttttgttttagcaaattctatgaatagaaggggtttgattatggatactaaaaaagaaaataattatgaaaattatatttgtgtgggttcatcaaatgtatcaaatgcgatgaaaatgtatttaaaggaaatagaggaatacaaaatgttgtcagcaggagaagaggtagagctggctaaggaaataatcaactcatcttcagtagcaaaagaaaaatttataaattcaaattataggttggtagtgagcatagcaaagagatataaaagagatagtattgatatgttggatttaattcaagcaggaaatataggacttataaaagctgtagaaaagtacgattataaaaaaggatacaaatttagcacttatgcaacttggtggataaaacaaagtataacaagatatatcgacgattgcgaaaatactattaggatacctatacatcttcatcagagaataaattttgtaaagaaaaagaaacaagaacttttaaatgtattattaagagagccaactatagatgagattgcagatgcatgtggcttagaagttgacaaagtgttggaattattaagaagagataaaaatgttgtatctttggatactccattaaaagaagatgaggatagtagtttagttgaatttataccatcagatgctgattttaaagatgttgtaatacacgaagttgaacagcataatttaaaagaaaagatagaagaactacttacaggtcttggtgagcaagaacagcaagttttaagaatgagatttggaattgatgatgatgaccctaaaacactagaacagattggaaaggtatttggagttaccagagaacgaataagacagatagaagctaaagcaataagaaaattaagacatccaagtaagttaaaacaattaaagcatttttattaatatttttagacacattatatatgagagtatgagaaagcatgttaatctctacttaggaattatttttttataaaatctgtttatgaacagcacacttgtattttataggtgtgctgttattttatttatttaataaagtacataatagtttagtaaaatttctcaatatggacaaaatatgttagaatatagtttaaaaagataataaaatctgttttttacttttaaagttatcgggtagcaactccatttctttgaatataattgaagctatacaatttatataggaaagatgtaaaacttattggagaaataaaaaaatatgaagaataatgtagtttgtgatatattaagaaataggtgttaattatattttgatagggctaagcaaggcaaattagttgatagaattatatctaatgagccaaattttacttgattaaaaagaggtatgttagaagtggagtgataaaatgagcaaggtagctaaagcaactttttatttgatgatagttactataatctctaagattcttggaatgggtagagaattagtattatcatcaatttatggtacaggcttatatacagagagttatttaacagctatgaatataccaaatattatatttgcagcaataggtactgctatagttactacttttattccaatgtatcaagatataagtagtaaacaaggtgaaaagcaagcactaaagtttttaaacaatgttttaaatataatagttggtatatgcatagttgtagctatattaggagttattttctcaaagcaacttgtaagtatatttgctataggatttgaaggagagaggtttttacttaccgtaaaatttactaaaatattgataacaggaataatattcataggtattacgagtgttatgtcagcatttctgcaaattaaagagaactttattgtagttggatttgggagtataccctataatatagtaataattatttcaataatgttaagtaccgtatttggaccatacatacttccaattggtgctgtggttgctatggtagttcaactgctcttttacatgttttttgttaaaaaaacgaactacaaatacttatactacttaaactttaaagatgatagccttattaaattactagcattactttcaccagtatttataggtgttgctgttaatcaagtgaactcattggtagatacaactttagcctcaacattagttaaaggaagcattccagcacttacttattcagatagattaaatggttttgttacagggacatttacagcttcaatagtatctgttatgtatcctatgttatctaagttaagtgcagaaaataatcaaaagaagtttactagttcagttaaatctagtataaatatgataataatttctatgattcctatttcagttgcttctattttttttgcaactcctgttgttagaatcatttttgaaagaggtgcttttgatgcgagggcaacccaaatgacagcaactgccttaattttttatgcagttggtatgactgcatttggattaagagatattttgggaaaggttttttattcattacaagacacaaaaacacctatggtaaatgggattatatctgtaggggtaaatatagtattggacttagttttaataaaaccaatggctcatggtggtcttgctcttgcaactagttcatcatcaattgcatgtatattgttactcttcttgaacctaaagagaaaagttggatattttggacaagataaaataataaaagcaactttgaaatcggtagttgcatctttaattatgggtgttttatcatactttacgtataaatttatatttggaattttgggagtaggaacatttaatgagtttgtatcactagctatttcagttatagttggaggtggaatttatacactactaatgactatttttaaagttgaagaggttgatatgatactgaatattgcaaagagaaaattgcatttaaaaaagtaatctaattatattaattataaatttaggaggattttatgaaacatatattaaaaacagtagaccatactattttaaaagctacaactacatgggaagatattaaaattttatgtgatgaagctgtagatatgagtgtagcatcagtttgcataccaccatcatatgtgaaaagagcatcagaatatctaaaaggtaaaataaagatatgtacagtgatagggttccctttgggatatcaaactactgctacaaaagtatttgaagcaaaagatgctattgaaaatggagcagatgaagttgatatggttgtaaacatttcagatataaaaaataaagattatgataatataggaaaagaaataaaagaaataaaaaaagctataggagataaagtattaaaagtcattatagagacatgttatttagatgaagatgaaaaaataaaaatgtgtgaaatagtaacaatgtcaggttcagattttataaaaacatctactggaatgggaacaggtggagctactttagaagacataaagcttatgaaagagcatgttggaaaaaatgtaaaaataaaagctgcagggggagttaaatcaatttctgatgcagaaaaatttatagaggcaggagcagaaaggttaggaactagctcaatatgtaaaatattaaaaaatgaagatacaacagattattaaagtttttaacttatgggataggattacaaaaatcaaaatttaattataaatataaagaacaaaaaacagagggaattttccctctgttttttatttagtattgacagaaaatatttttcaagatattataagttatatagttaattagttgagtaactaactaatggagaaaggaggaacctatgaaattagtattaaataatgaagaacctatatttattcagatagcacgagcaattgaagatgagatactatcaaatggaataaaagaagaagaacaggttccatcaacaacagagctttcaaagctttataaaattaatccagctacagtattaaaaggtataaatatattggttgataaaaatattttatataagaagagggggatagggatgtttgtatcagatggtgcaaaaactattataaaagaagctagaaaagaaaattttaaacataattttgtaaaaaacctacttcaagaagctaacaaattagaaataaatagagaagaattggttgatattataattaatttcaaggaggattaatatatgaggagttctattaagatagaaaatttatctcacagttttaagaagcaaaatatttttaataatatgtctctaaactttgaaaaaaataagatatatggtttattaggtaagaatggagctggaaaaacaacattattaaatataatggtaaatcagttaattcaaaatgaaggtgagatagaaatattaggaaagaacccaaaagaagatataaaagttttggaagaagtttgtatcgtcagggaaaaagaattttatagtccagattttaaagtaggtcagatatttgaattttcttctagtttttataaaagttatgataaaggcttagaagaagaattatgcaaatattttgatttaaatactaaaaaaaagtataaacaactgtcaagaggtatgaaaactatactttcaaatataataggtatttgttctaattcagctatcaccatatttgatgagccaacaattggtttggatgcagtaaatagacaagagttttataacataattttagatagttatataaaaaatccaaggacaataataatatcaactcatttgattgatgaaatagatgatttactggagcatgtaataatattaaatgagggaaaaattattatagatgaagaaattgatgtcataaaacaaaaagctcattatattactggaaataaagaagagttagaaaaattagaatgtataaaaaatataaaacctaaaaaggcatttggaaatgcagttgcttatttttactatggtgattttagtgaaaatgatgaaaaaatacttaaaaattcaaatattgatgtaggatacatagggctacaagatatgtttgttaacatgactaagaaggaggaattgtaattgaatgaattaaagccatatataaaattttttaataaaaatactaaattgtatataattatatttatgattgtgggaattgttatgaatattttgccagtgtttatcctcaagatttttggagaagcatctaaaactaatttatccacgattgtgaatcctattttaacatatataactatactgctatttgtgtatggagtaaatatagcaaataaagacttttcaggagctttaagtataagagcagatcgaaaaagttgtataaaagctattgtcatagatttaattattttaagctttgtgatttctattttaggtatagttttgatttttttatcgaagttatttatagaaattataacaggttacagtatagaactatcagttttactaaagagagatatgatttggacatctatatcagcactgatagatccttcaacatcaagtatgccactaacttatttaaattattttgtacaaatatgtataaatgaaatatgtataggttttataggagtattacttggagcttttacatatagagttagaaaagttactagtattactatattgataggattaccgatattaatggtaatttatatagttaattttgcaactaaaaatatgcataaaatgctattgtatttagaaaaaattatttattcatttcagaatccttttattttatttggaacaaaggtaggaattatagttatttgcataatatttataattttattacttagaaaagcaccaattaaagagtatgcaaatgacttattataactaaaataaaacctgcttaaaaatcaaatttgtaaatttgtattttaaagcaggtttattagttttaataaatgttgattttaagcattaatttttaatacttatatctacctttatatttttttataaatagaatagatataaatatggttataacctcagcaaatggaactgtaagccataatccagtcatgtttaacataggaggaagaattatgattcctatgattataaaaacaaaggcacgactaaaagatataatagctgaaatttttccattgtgaaatgctgtaaaaaatcctgatgcaaatatatttataccaacaaacaaaaaagcaaatgcaaatatttttaatccttgtaaggctagtttaaatactgtgttatctggacttacaaaaaccctaacaataaatggtgcaaatactaaagcaataataaacactaaaagagaagaaacaaatataaattttagagaatgtttaaatgtttcttttaatttatcactgttttcagcaccaaaattatagcttattaatggagacactccagcagcgaatcctagatagactgatgtcattaaaaaatgagcatacaatactatagtaagagcagcaagtccattttctcctgctaattttaaagctactacattaaataagaatgttgtaattcctgtagataattctgtaaccatttcagaagaaccgtttatcatagtatctcttataagtctaaaatcggtttttggttttcttaatttgagtgtagatttattagataagaagtaaataatacctaaaacacaagttaaaataatacctatagcagttgcaactgcagctcctaaaagacccattccaaaatatttaataaatacataatccaatattatatttgttacaccaccaatgactgatagaaataaactaaatttagaatttccatcagttcttgcaaagtactcaaatataaattttaaaatataaaatggtgtacataaaatcataactttaccataagttatacaatatggtaataacttatctgttgcaccaagcaaaatagatatttctttgataaagaaatatgagattactgtgaatgaaatcccaacaatcaatgaaaacaaaactataaaagaaaatgtagagttggcttcatcctgtctattttcacccatacgtatagaaacgatagcacctccacccgttgccatcattattccaaatccacaaacaaggttaattataggtagtacaatatttatactagcaagagcatcggaaccaactaatgttgatacaaagatgccatctattattgtgtacaaagatataaatatcatggatataattgcaggagaaacaaattttagaaattcaaaagtagtgaattttcttgtaaataaattttccataaattttacctccttttattactctctatctataataagctatatagtaactatatagtcaagaaaaattttatttatacgataaacagcttaaaatcaacaaaaaatcatattaagataaattagtataatgctaattaataaacttatattagtaaaaataggtatattgcattagtaaggaataactgtttcttaagaaaatttttagaaatatatgtatataatcttaagctttataagttattatatatatataagattttgtctgaaaagaaatagattttaactatatatcttttatacaacttattttaaattagttcttatttattaaatataatgttttaatatagaagagaagttatttttatttcaagcagccattttatatactatataaattctaggagtgtgagatatgaaaaagttttttatggtagttttaggatgtatttttgttttaggtgtgatttctggatgtagcaaaaaagaatctaagccagtagaaaaaaacaagagtaatagtgaatggtttagtaatttagatacggaggatgttgatggaaataaggtaacaaaagagatattttcaaataaagaacttactcttattaatgtctggactacttggtgtggaccatgtgtgggtgaaatgccagagcttgaagcattatcaaaagaatatgagagtaataattccaatgtagctataaagggattagttgtagaagttgataaaactgatatgagaactggtctttcaaatgaagagaaaaatttagttaaaaacattatgaaaaagtcagatgcaacttaccaacaattgactgtatctgaagaacttaaaaaaactgattttaaaagagttatggagtttccaacaacttattttgtagacaagaaaggaaactttgtgggtgagaaggttgtaggtgcaaatagtaaggaagagtggaaaaaaattatagatgaaagactaaaaatggtaaaagccaatgagtaactttattaaagataataaaaaaggcatttctattattgcaattagtattatatttattgcattaggtacatatcgtggagaaacaaatacagtattaactaaagcaattatgatttgtcttgagtgtattggtattggttaggagaagaggaatgaagttattatctaaggtaaataataatataagacttattattcaagttgcatttacagcattaacaaatggatatgtaaatggatttttagaaggaactatatatggaggagaaagtaaaaaattatgtgtacctggattgaattgttattcatgtccaggtgcacttggagcatgtccaataggttcattacaagcagttttatcaagcagagagtataaattctcattttatgttgttggttttttaatggcatttggtgctttttttggcagatttgtttgtggttggctttgtccctttggacttgtacaagatttactacataaagtaccctttccagtaaagataaaaaaagtttatggtgataaatatctaaaatatctaaagtatatagtcttaataatgtttgtaattattttgccagttgctattgtaaatgtagcagggggtggaaatccttggttttgtaaatggatttgcccttcaggaacacttttgggaggaataccacttattttaggaaatgagaatttaagagaatcaataggatttttatttagctggaagttaagtattttgctattgatattattgatgtcaatcattacttataggccattttgcaagtatatatgccctttaggagcaatctatggtttttttaatcctatttcaatatatagatttaaaattgataaagataaatgtacaaattgtacagcatgtcaaacaaaatgtaagcttgatataccaatatataaagatgtaaatagtccagactgtattaggtgtggtgaatgtataaaagtttgtccacaaaatgcaattactacaactttttcaaaagataaaaaagagaataatatttgtgcaaaaaagtatagggggatataatttaatgaagaaatttattctatgtattataatgtttgcaatatcagtactggtgttagctggttgtactaatgataataagataaaaaatgaagtggatagtatgtttaattcaataaaaacacaagatgcagatactgttgataagtatttcccaaaatcagggttaggtaatcttatatacgaagataaagaaggatttaaaatgtattctaaaaatatgacttgggaaatttcagatataaagaataataaggataaagtgactgtagatttaaaaattaacaatactgatatggtttctattttaaaaaagaatcctcctaaactaggagaaatgatgccaaatccaactatgaaagatattgattctgcaaagaaaaaagaatttaatattacattagagcttgttaaatctggtgataattatgtttgtaaagttaatcaagaatctgcaatgaaattattaaatgtgattacaggaggtggtatagattatctagctgactataataaagattattataaacagcttgatgaagaacaaaaaaattatgaaaataaaaatagttagtaatatatatgaaaattggagcaattaataatatagaaacacaaattaaaagaatataaaagtggtagaatgaaagtcttgtagaagcttttattctaccacttttagaaataagttatttcatatgattttattatttatagagctatttacatgtatgtatattttatagaccaagattttctcctaccaatattacctttattttttttgctggacgactgattcttgtagtaaccatgtatgcacaaatgctttcaggacttgtgcaatctatacaacttccattaatatagcatggtgtattgacatcttgaaaacgctgaacaactgctggagatgcaattgttctagttctttgtattgcatcatcaatgttttttacaattttattcataccagctacaactataacattttttggaccaaatatcattgcagctacacgattgccatttccatcaatattaaagagttgtccatcttcactaattgcattgctactcatcaaaaaagtatcgcatagaagtgcttgacgcataatttcagttctttcttctggagtttttgctaaatctctatcaataactttaaatcctttctctctaacagcagtttgtacgcccatttctttaagtgtttcagatcctccccatgatactacatgattttgaggaattaaatctaaaatttgttgcaaagcttcatttctagttttacagtaataagcatcaaaataacgttttttgaatgctgttacaatatgaggacctagcttgtcatatcgtttctctaatggtgtttgtcttatcatactaaaatcactcccatatttaaattttaatattgtaactattatgctaattaagattatacgatatattattgtataaggttaattttataagtaatcttttcctaagattacgaaaatagttacaatatagttataacataaatatgcgattagtataagatttactattagtttttaacaaataactgaataaagaaatacttataaaacataatcactaatactttttatttaatataaaataaagttgtgggttatagatgatgattattttattttatgaataacttgtttaaattttataagtttataaaaaataaaggtacagttaactgtacctttattttatctaaatatgcaaagattattttaaaagtaatttttaattacatgtttttataactctccaatattctaatataatgatttgcctctcttaaaacatggtctgctaaaagtggtaatattatagattttatcttacactgttctattcctgatgctcctgcttctttaaaatctttaaactcaacagtttcatttagagtttcttctgtaatgttcttgatattagaatcagtcatttcgtttgttttttcaattaattcattaaattttatagcaaaatcatttgaagtatttattagttcaccttctgaggggtctagtaatcctctcataaacagagcatgttccatcataatatggtcccagaataattctatttctttagcgttttttgactcaatatctattttattttcaaggtcaactacataagaacgatataaatttgcttcatgtattatatgttcaagaagtagagggtagtttgatgtaaatatagtacatgatagtacaccatctaagactctttctttaaaattaataagcccatcaagtaatcttattgcatcagagttaagttgagctacatagttcactaagtcttgaccaacttgtgggtttacaccactttgtagatttaattctcttgtagtgatgtctttgtttatttctatccctgtaaactcttctgttttttgttctgcaactgatgtgagagtagttacaagctcttctgaatataatatatcaggtctaattataccattactagcactaacagtgtatgataataaatcttcaaattgctttttatagtggtcagcttccatagcaagattataatttttatttgtgaatcctgcttctaaaaaaagagcatgctctttcataattcttgaaaaaaataaatgtaattctagtgataaaataacatatttttgattatctatcataatttcctccctttagaaagtatcctatttataatactttattcgtaatatttaaatttatgtatattataaataaattaactaaattcaattgctactaatatcaacagtttttattaagttatgggcgaaaaaattatcttactgtgtttcttattagatatagatataatgatttaaggtacttgttggctattatttattaagagcacaagtaatactagaaatttttatgagaattatgtaatttataagtattattttgatacaaaacaaatattttttgtgaaacaagaacttttatagcaaaaaatgaataaatatgaagcaatcataattttataccacaacaattattaattctaatagctgcacttaatgttttaggtatgggatttaaaaagtataaaaaattaagtgataaatatattccattatattgcttgtgcttggagtagtattttctgtatggatgttaggatttaatccaacttctattttacaggggattctatgctggggtgtttcaattggattaaattaagtatgcaaacaatttcaagacaatgataaataattggatgtgtgataggaatatcaacaaaaaacattattaaaaagaattattttatttataaaataaaacaagtaataagaataaataaggagcaactaaaatgatttaaatatactagaattaaaaagagaatgtaaagttgtctagtaatggaggtaaaatattttaaacgataagctatgaaattgatatattaaaatgggtaagaagaatattatataggattcttcttacccattttaataaatttaattttatgccaaaccacattcgcatagtagaatcatcactctatggagacataactctacaacatcttctccatattttttaataaaatcaccaatttgagtttctatgaatgaatagtattcttttaaactagcaatatatgcagtcattatatgaacacattcatcaatcttatctttaaacacaactaatccccctaaaaaacgaaaaataaaaatattcagtaaatagcagatattatttcactcataaatctatatagtatgatatattgcttagatatattttacaagtggatatgtaaaactggttattataatcgcaaaactggataaactttcattcttaaaagaaaatttatccagtttaaagtttaattatgaatatttgagttagtagatatttaatataaattaatataagtgtaataagaatatacttatataattataattaatcatacttttaaggaatttaattttaaaattttagttattgtaatctattattttctaagcaatttattattttttaggtaatttattactttttaggtattctattattttttagatatattatataaaattatatactatatatttaactcaaatgtaaaattatcaattagtctggtttttcctataaacacagcaattgccacaaggatagaatgttctatttgcttaacaggttgtaatgtctcactatctacaatttcaacatagtctatttttgctaagtgttcagaatttattttagctgttattaattcttttatattctttggatttagattgccttttactaattcttcttttgctaaacttaagctcttatttaatattagagcagattttcgttcttcctcagagagatatgtatttctcgaactttttgctaatccatcattttcacgaattataggacagcctattatttctgtatttatgtttaaatccttgaccattcttttaattacagccaattgttgggcatccttctctccaaaataagctttatcaggtgttactatatttagaaactttgaaacaactaggcagacacctccaaaatgaacaggtcttttagctccacaaagaaaatctgtaagtccagaaacattaatggtagtacaattaccttttaaatacatttcttctggtgatgggttaaagactactgttgctccactatccatacaatatttaaaatctttatctatatctcttggatagctattaaaatcttcatttggtccaaattgagttggatttacaaatacactcactactactttatcattttcttttacagctttttttataagactttggtgtccttcatgtaaaaatcccattgttgtaacaagccctatagaatagccatgttttctccaatctttgattatatttcttagtaatttaatttcttttacaagcattttgtaccatccttaatattagtataatttttctaactcagattcatttattgaaaagctgtgtttttcttgtggaaatgcacctgtattaacttctaggatgtaatttttaattgaatctttcattatatctcctatatttgcatactgctttacaaacttaggaacaaaatctccaaacactcccaacatatcttgataaactaaaatttgtccatcgcagttaattcctgcccctatacctattgtaggaattgaaatagaattagttaccatatcagctattttcgtaggaactccttcaaggacaatagagaatgcacctgctttttctattaatttagcatcttcaataagttgtcttgctgtttcactggtatttccttgaaccttaaacccaccaaatgaatttactgattgaggagttaatcctaaatgccccattacaggtatctgagcatttacaatgctttctatttgctttataacgtttgagccaccttctaactttacagcatgagctcctccttcttttataagtctaccagcgtttttaactgcatcttctatagaaacatggtaagatagaaaaggcatatcacttacgattaaggcattttttgcaccattttttacagcttttgtatgatatataatttcgtctatagtaacagatagagtgttttcttcaccttttatgaccattcctaatgaatcgcctattaaaataccatttatatcacattcatccattatttttgcaattgagtagtcataagcagtaagcatagatagtttttttccttcatatttagcgttcttaaaagtctgtatggtatttttcatcgttttttcctcctaaaagtttgtaaatttctttgtatttttcagatttacttattaaattttcgattgcattttctatagtaatattttttgtaccttttaatgaattgtcatttcctaaggcaattatttttagtaggtttaaggatagtattttgtagatatcctcatcttttttattcaatacagatagatgtttccttattggtgttatatctccacgagaaacaggaccagtaagagctttagtaaagccattatcaagtatattttctatatttttttttactaaaggactgatagcttttaaagattcctcttcagataaacctaatttaataaagtaacttactcctatatctagtaaagataatactaaatttgaaactaaaacattagctagatgataagtggatgaagtatccttatctcttataaaaaattggtttcccaaaccatctatgaaattttgaataactaaatcatcttgttcattatcaccttctatggaaaaacaaatgtctttcattttttttatgttggtatttttattggaaaatgcaaatataggatggatagaataaattaatgcacctgctttttttgaacagaacaatatactagattttaaagagccacttgtgtggcaaatgtatttatgttttaaattaaatttggaaagttttttgtctataatttcaatagaatcatctgatgttgtaataaataatatatcgttttcataaattatatctctcaaattgctgtaaatctttgtttttgttaaatttattgattctaataaagataattgattccttccataaaagcctgaaacacaataaccttttgataaaaaataatttgccaaagatgttccaacttttccagaaccaataaagcctattttaatagtatcacctccactttgtgatacaacatcttaatttctaatctcattcctgaggatatgagttacataagacaaaataattaaaaacatttaaagtatagttcttataacaagataccatccataaatatcttaccattttcataaaaaattgacaattaattctataaaatttatataataaaatatcagtaaaaaaattatgatatttataaaatataagttttttgttttactatatatattaaaagtgattaagtctattagaaaaattatgatgtttttagaaattaatgctttttaacttcaatagtatcaataatactgattttttataaaaatttaaaacaataataaaatatataatttatttttgtggacaatttgtcaagattagtaccaagttaaaatttaatataagagagagatgtattatgtaatattaattttttttaaattggtaatactatattgctgtatttttttttatcaattataatttaaaatatgaaataataaactttctaattaaattaaggtatttagtgtgtatgtataagttataagtaaatcttctaaaaagaataattttaacagtgttgttataaagagcagtaactatggaggagataagtatatgaacaaacgtaattttgaagttatattaaatcaactacagattaatatatatgttacaaatattcatactaatgaaattatttttatgaacaagaaaatgaaagaagaatataatattttagatccagaaggaaaagtttgctggcaagtattatatcctgagcaaaattctacttgtagtttttgtaaagttttagaactattaaagaatgataaaaaaggagtattaataaagtggtatgaaaaatgtaataagttaaatcgtgtttttgaaaattatgatagtttaattacatggcaagatggcacagttgttcatatgcatcaatcaatagatattgcaaactcaacaatcttaaataaaccaattaagattaatgaatttaatgaaatatcaaatactaaagaaggaaaaggagtttttaatttttcaagagacaattttgattataattctacattgctttatgatgctttgattagaggtacagatgaatatatatacatttgtaatatgaaaacaggcgtatttcgatattcaccatcacaagttgaattatttgacttaccaggagaaattgttgaaaatccgcttatttactggaaaaaaattgtacatccagaagactggaatcgtttttataagtcaaacactgaaataggtaaaaaccagatggattatcatacagtggaatttagggctaaaaatcgtagtggagaatatatatggttaagatgtagaggacaactaatgcgtgatgaatttggagaaccaagtatttttgcaggaataatgacgcaattaggtaaacaaaataagattgattcattgacacagttactgaattatcatgaatttatgagtgtatttgaagataaaatttcaaatcctatgattgaaaaattatgcatagtattattaaatattgacgattttaaaaatgttaatgagatgtatgatagggattttggagataatataataaaaacactagcacagtctatacaatctattttaccagataatgctgaactttataaacttgatggggacgaaatgggtattcttgttgataatgttgaagaaaatgaaattctaactctatataatcaaatacagaatatgattatacaccttcaactatggagaaaatatggattaaatataacaatttctgctggttgtgtaatatatccaaaacatggagatacagtaaaagaactttataaatgcgctagttactctttacaatatgcgaaagagcatggtaaaaacaggcttgtttttttctcccaagaaatattaaaaaataaaatgtattcattagaaatgatgcgggatttaaaggcatcaattaatgatgattttaggggatttagtcttcgattccagccacaagtagatacacaaagtcataaaataataggtgtagaagttcttttaaggtggactaatgacaaatgcaaagcaatttctcctttggaatttattccaatattagaagaaaatgatatgataaatattgtaggggcttgggtgcttcgaatggcattacgtacttttaggaaatggattgattactatcctttttttaaagtgagtgtaaacgtttcagctgttcaaatattagaagacacatttattgaagatatagtaaaaattatagatgatgaaaattttccttatcaaaatcttgttttagaattgacagaaagtcatacagtacaaaatatgagtattttacagtttaaatttaaggctttacaagatttaggaatttatattgctatggatgattttggtactggatactcgtctctagaagttttaaaattttctccaatagatatagtgaaaattgatagagtatttgttaaagatatattaaagagtaagtttgatgctacatttatacattttattgttgcaatttgtcatgatgtaggaataaaagtatgtttagaaggtgtagaaacacaagaagagtatgatttagttaaacaaataaagccagattacatacaaggatatttatttggaaaaccgcagacagcaacagaaatctttgaccttttaaagctagataattaattctaatttatcaataatatcactgaaaagctttaaaatcaaaaatacattaaattattatattgaagatatatcaattataaattgcaatataagaaaatagcatttcaagggatgttaaattaggagtagtatatgattaaagtattttaaaaagggataactataataaaaatagatatctatttttagattaaaaataatatatcataaataaaataataagaggtagatacagttttaagggaatacaaaagtttttaattaaactatgcttgttcagatagatatttatttaagaaaaaagactattaaaagcaatatacaagaatgatatattagattgattaaacaagcataaatattatgtaaaaaactttaagttatagaatttaaatccaatgtagatagattacgttttttcttgcttttattatggtataaattggtatcaatattcaaaagtaatatatttatgatataataaaattatagaaattttgcagtgagctatatttgtgataaaatttggcgtaacagttgaaatataaggtgttgagagtgcatgataagcgttatcaattgcactattgctcgttcactgcaaatttaggagagttgtatacgtgtaagtgttgaaaatactaagtttattttggggttttatattaactatatggaatgtaaatctcggagaatttcctaatgtggatttaataggaagtgttttatattaactatatggaatgtaaattttagcaaatttttcgtaaaagtcactattttcaatggttttatattaactatatggaatgtaaatacatataaaactttcatcttctgttaattcattaaaacgttttatattaactatatggaatgtaaatccatcttttgttgttttacataaatttatattacttacgttttatactaactatacggaatataaatttttataattttcttttaatgtgttatcttatgattatctagttatattagcatacaaaaatataataaaattacactatattataaaaaccaaaaggtagtatagaaatcctattacctttttattattaattttatcagtgttttattataaatagcttacataattacacattttttctgattaaataatatgatgctattgttataatagatactaatgctaatgatgttattgcagtatctaatcttcttattaataaactcatttctatatattcaagttctattaaatattgataaaatatttctagtttaacagctttttctctatctatatttccatactttaactctaatttatctaaagattttttattacaataattaactttatgtttaattaaatatcttattgtagcacctattacaattttcactctaacaagcataaatataatattccatccaaaagttaagaggggatatcttttttatgagaggaatggataaaatatttataactgacatctaactgatatttaagctttaaaatcaaaaccatattgattttctaaaataataactacttgatttagtaaataataaagaatatagtaactatatagacaacaaaaagaaaaggagtgtataacccttggaaaaacagtattttacaacaggtgaatttgctaaattgtgtggtatatctaagcagacattaattttctatgacaaaataggtattttttctcctgaatataaagataaaaataattatagatattactcagtttatcaatatgatacacttgatatattacaatcattaagagaaataggaatgagtttagaggaaataaaagagtatatacaaaatagaactccccagctttgtgtgaaaatgcttaaagaagaagaaaaaaagataagagaaaaaataaaaaaactaagaaagataagctctaagatgcaaaatagaataaatataacagttgaaggaatttctaaaatgaatagtgaagaaatttatatatccaaaaagtttgaagaatatttagttctatcaagcgatttgagtaatatgagtaatagtgattttatgatggaattaatagatttcaccaattattgtaaatcgaaaaatttgtatcaaggatatgagttgggagtaatagtaagtaatgaaaatataaaaaatggggactatttaagtatatcaagtttttatttgaagatagataaaaaaataaaggataaaaagctatatgtaaagccagaaggaatgtatgcttgcataaaacatattggaaaatatgaggattcatataaatcttacgaaaaattgaaaaaatatatatatgaaaatgaatataaaattattggaaattcgtatgaggagagtatacttgactttttttgtgaaagtaatgaagataattatatgactgaaatttcaattcaagtatccagataagaattaaaatagagatatattcaaatgttaagtaattttacttatcattgaatatatctctatgctttataataaagtatataaatttttaaatagtttctctaatatatgtctaatgtcagttaatactaattatataaataaattgtaaactgtagttgttaaaaaacaaacaacaaaagcaagtatagtaggcattaagaatcctaaggcagtccattttaaactaccagtttctttttttattgttaaaagtgttgttgcacaaggccaatgcagtaaactgaacagcataacatttaaagctgtcaaataagtccatccatgttctctaagaacttgacctaaagcactaaagctatctaattctatcatagaaccagttgctaggtaagccattaaaagtataggtacaactatctcatttgctgggaatccaagaataaaagcaagtaatataaaaccatcaagaccaattaatttagctaaagggtctaaaaagtttgcaacatgtgataatatgcttaaatctcctatatatatatttgcaaatatccaagttatgacaccagcaggtatggctaccattacagcccttcctaaaacaaatattgttctatctattatagaggtatataaagttcttcctatttgaggaactctataaggaggaagttctaatgtaaatgtagacggaactccttttaatagcgtcttagaaagagtataagaaaccaacaatgttattataacacctagaattatcagtaaagttatgcaaagtgcagttgctacgcttgatacgaaagagttggttataactgagctaaaaaatattgtagatatagctatcaaagtaggaaaacgaccattacaaggaacaaagttgtttgtaagtatagctataagtctttcccttggagagtcaattatcctacaaccaataactccagctgcattacatccaaatcccatacacatagtcaaacactgttttccatgtgcacaagcttttttaaataggtggtctaagttaaatgcaactcttggcaaatatccaaaatcctcaagtagggtaaataatggaaaaaatattgccataggaggtagcattacagagattacccatgctaatgttctgtataatcctaaaaccaacatatcatttaaccatgatggacaattaatactatttaatatacccgaaatacttggctcaaatccgagtaataaattagataataaagtggatggatagttagccccttctatagtaatccacaatatagtacctaataataagagcattattggaagcccaaatattttagatgttaatattttatctactttttcttctctatcagttgattttttagcaacattagaacaacactcatcactcagttttttagcataatcatagttgattttagtaaactcatctcttattttctgtttatttatattgtctggaatctttttctttacttcattaatagcatctatagaatctttgtctatataattactcatagattcaaatatactttcatcgccatcaataagtctaagtcccaaccatctagaatttatacctggtataatattatccaattctggttgaattgattttaccacattctctatattttcattgtatctaacaggtttattatttaatttgtatttgtcaaaagatacatcatttaaagtatccaatagttcatccataccagagccatttcttgcagcagttaaaataactggaataccaagagaatcctctaaaagttttttatcaatagtaatgcctttttttctagcttcatctattaaattaatacacaaaataactttatctgtaagttccatcacttgaaatactaaatttaaatttctttcaagacatgtagcatcacatactactattactgcatctggattaccaaaacatataaaatcacgagctacaatttcttcttgtgataaggcaaataaagaatatgttcctggtaaatctattaatgcatattcggtatttttatatttaaaattaccacgagctgtagctacagtttttcctggccagtttccagtatgctgtctaagccctgtaagatgattaaatacagtacttttacctgtatttggattgccagccaatgcaattacaaactggtcttccttattgtctatatcaaacatatcttttaaagaactcattttagttgagttatgtgtcaaccccatattaatatcctcctgctagaaatttttaaatgtcagaaactaatattaagctactttcttcttgtcgtagagctatcttactacctctgattttatagacagttaaattattttttggaccttttctaactacatctataacagctcctctagtaagaccaagcgctaacattctttctcttaaattaccactagataatatatcttcaactttgacagtttttttcacttgaatatcgttaaggtttttcatagtagcacctccatgcttgaaatttagcctgggctaatcttcttattctaaactatgcattatattattaccttgttacttttacaaaaaaaagataggcaagatgcctatcatacaaagttgggtataattcttacttttggggaaagtagaatatagaataaaaattaacactttgaatccatataattattgaattttgataataaaaaagtcagaaagcaaaagcctcctgactctatgtaaggtattttcaaatacctaaatatcaattcaatatttaatttatacttaaattatatattaacaatattagcttgtcaacactataatctcattttaatatgttcaatacctgcttcgtcgtatacttctgagatttctttaaaaccacaagataagtaaaggttctttatataagtttgtgctgataaggttatattattttcgtgtaagttaatttttataaaatctatagcacaatccatcatttgttttgctaatccttttcttctatgactagaaagaactaaaactctaccaatggaaacatcattataagagctgtattctttaggaattattctagcataagcacaaatcaatccattttcttttaaaaatatgtgataagagcttttatctatatcatcataatcgtttaatgaaaatatcttctgttcacaagcaaatacctcatatcttgattttgctatttcataaaattcatctaaactcaaatcattaaagtgtttaattttaaacatagtaattacctcctagcatcttaaaaaactgaatattaagatacattataccatttttaacataaatacctttattaaaatttatatttattaaaaatatttttaaaaagtgatatactatattaaaaacaaaactttagttagaaaatttatgatttatggaggcagtgttttgaatactactaaaaaattaactgaagcagctttattgtcatctttattcatagtagtaacaattatagctgtgagtactggatttggatatgctatttacttagattttatagtgccagtatttttttgtataatctgcttgaaatgtgatttaaagtataccattttatctggaattacttcacttttaataatttctctggtacttggaaatctaggaactgctatttgggcaagtcagagtgtattacttggtataatgtgtggctatctaataaataagcctacaatggttatggatgatttagtatatggttcagtatttggggttattgtaatggttttcattgatatatatgcttcaacattaataggttatagttttatgaaagaatttcaaggatatagcaaatggatttattttaatgggtatacaaattttatttattatttaatgatagcattgtttccttttggtatggtgttttgcatatatttattaagtttaattttagggaataaattgcatattttagattctaattctttaaaaaaatttttaatatttaagaattttagaagtttaaaccaatttttatgttgctcaaaaaaagctttttacatatgtgtttcttatctagccatttttgaagttctaaaactgttgaatgttaaagttgattctgtttatttaaaaacaatctttatatcaataacctatataagtgtctattttatcattagagactcatgtatgtcactacaaaactttataatagctaagtttagaaaattattatatgctagaattttatttttgataataattttattgctgttttttatatttgatgtaacagttattagtttaataattataaacgcatttttaaataagaaaataaatataagattgagtcagagtaatatagtcaataaacaaataaatcttttgattgaaaaataaactttgggtattggtaaaaaatataaaaaagtagtataatgtaaaaaaacatgtatataataataaaaaaggttgacaaaatataaaaataataatatattatgagtaagttaagaaaaatttcttgtaattgatgaaataatctgaatatataaatgctatgaagagaagaagtagggctagattttatttaacagagagttccagtttggtgaaatggaataaattgatttagtttgaatacatctcagagcactatctctgaaagataacaaccattaagagatatcggattagtacacgttatagtacacgagtatatgtaattgtactctaagagattaatatcgtgagatattgatgaactaaggtggtaacacgtaagcaatgctttcgtccttttaagaggatgaaagctttttttattataaaaaaaaaattatagattatataaatattttaggaggaatgaaaaatgaaatcgatagacgagcaaatgcgaataattatgaaaggtgtagatgatttaatagatgagaaagagttaagggaaaagcttattaaatcagaaaaagaaggaaagcctatgatagtaaaattgggtctagacccaagtgctccagatatacatttagggcatacagtagttcttagaaagatgaaacaattacaagatttaggtcatcaaatagtaataataattggagattttacaggaaaaattggagacccaactggaaaatctaaagctagaaaagctttaacaacagagcaagttcttgcaaatgcaaaaacttatgaagaacaaattttcaaagttttagataaagaaaaaactattgtaagatttaatagcgagtggttagccaagttaaattttgaagatgtaataaaattagcagcaactattactgttgcgagaatgttagaaagagaagattttaaaaagagatatgaaggacaaatgccaatatcagtacatgagttcttctacccattaatgcaagcatatgactctatagcattagaagctgatatagaacttggtggaactgaccaaagattcaatttactaatgggaagatcattacaaagagaatttggtatggagtctcaaatagtaataatgatgcctttaatagaaggattagatggtaaagaaaaaatgagtaagagtttaggtaactatattggaatagatgaagaagcgggaataatgtaccaaaaatctatggaaattcctgatgaacttataattaaatactacaatttagtgacagatgttcatcctgatgaagttaataaaatagaatctcagttgaaagagggttcagtaaatccaagagatataaagatgaacttagcaagagaaatagtaacattataccatggagaagaatctgctaaagaagctgaagaaagatttaaatctgtattccaaaaaggtcaaatacctgaagatatacaaacaattcaagttaaggaagatggatttgacttaatcgaagtactagtttctaatgagattgttaagagtaagagtgaagttagaagattagcttctcaaggtggagtaaaggtaaatggtgaaaaagtagaggatttaagcactattgtaaaagagagtgaattagttgttcaaataggaaagaaaaaatttgtaaaaatcgagctagtaaaatagagtaaagtaaaagcaagtctattgagtataaaatgtacattcaataaacttgcttttttattatattaaaattttaaattgataaccattgtctttaaaatatgttataatttggtccaatgcatttactgtttcttgttttccataagtatcatgcattaaaagaacaaccatttctttgccttcagaagatttctttgcatgttcaaataattcttgtgcatttttctttttaccttctgcatcagcatttaaagcgttccaatcaattgatgccatgtttttctcttttaagtagtttcctagaggttccatatttttccatgacatatacccgcctgggcatctaactacatttgaggaaaaattctttcctaagacttttttcatagcttcatcagttttgttaagttcatttacgaatgtatcgagatttaggcttctgccaggatatagttttttatagtcatgggtataagagtgatgggctattgcatttccttcgtcaaatgttctttttaaaatttcattagctccttttctttcaagagaatcacccttaataaagaaagttcctctaacaccatgtcttttcaagatatctagaacttgtggagtattagtagtagatggtccatcatcaaatgtaagaaagactatcttttctccattgtttgaatagtcgtatttgttaagtttgtcccaaactatttttgcgtcatatccatattcttttacagcttctttttttgcaccaataataggttcatttttttctttttcaattctttctttttctaatctttcagctttaagtctttcttgagtttctttcatttctttttttctagacatgtccgcccatgccatagaaaaaataccaataactattacaacaagtatagtaagtgtaacagttttcttttttcttttttttaccataattacagcattcccccttttgtcgaattgtatcaaaaatatattataattatatcgaagaaagtagaaaaagtaaaccgacaaagttgtaactaagataactaaagtgtaacttatatgacattatttgcataatattaaagtatcatatatattaaaaatatctataaaaaaatttagtataggtaaaaaaatataaaaaatataaaaatttattaaaaaggtgtttacaaaaaatgattaatatattactgttaaatagtggatataaatttgagctcaaaatgtatgtaaatttagatttaaaatactgaaaaaatttactatattaatttatagtaatgcttatagaaaaactctcttgctgtttagggggtttataattttgcaaaaaaataaaaaggagggggctttattgaaaaaatactttggagaaataggactaatatttatagcaattatatggggaagtggctttgtagcaacccaatttgcattagacggtgggcttacacctctacaaatcataactttaagatttttcttggcagctataattatgaatttactgttttttaaacagattcgtgccaatatgggtaaaaaattattaaaagcaggagggattttaggaatatttttatttctagcattcacagtacaaactattggacttatgtacactacaccatctaaaaatgcatttataacagcagctaatgttgtaatagttccgttcataggatttatactttatagaagaaaacttgataaaataggaataataagtagtttggtagctcttataggaattgggatactttctttagaagctgatttctctattaattttggagattttctaacacttatatgttcattcggatttgcatttcatatattctttacaagtgagtttgcaaaagataacaacccaatggcattgacagctattcaatttacagtagcgtttttaatgtctgttgtagttcaaacatttgcaggtcaattaaagatggaagctgaattatctggttatatgggaactatgtatctagctgtatttagtactacaattggatttttatttcagactatatgtcaaaaaagagttgatggaactagaacagctataatattatccacagaggctgtatttggtacaatattttctataataattctaaaggaacttattacagcaaaattgattattggtagtatcttgatatttgttgcaatcataactgcagaaactaaattatcttttttaaagagcaaaaaagtgaaacttaaagattcagaggagtcttcattagaaagtatttaatatgacaactatttcctaattaatcaaataagttatgtattatgtagaaatttgacatcaaaacttggttgatactggtgtttcaaagtgataaaattaattaggaaataaattttatttttagtgtttaagctataaagtctggggtatatatattcttgtagcaagttattaaacttaaaaataaaaatttaattatataaaattgggaggaaattaattatgaaaaaatttgtttgtacagtatgtggatatatacatgaaggagatgctgcaccagcacaatgtccagtatgtaaagttggagctgataaatttgaagaaatgaaaggcgaaatggtttgggctgatgaacatagaataggagtagctcaaggtgtagatgcagaaataatcgaaggattaagagctaactttactggtgagtgtacagaagtaggaatgtatttagcaatgagtagacaagctgatagagaaggttatccagaagtagctgaagcatataagagaatagcttttgaagaggctgaacatgctgctaaatttgcagaacttcttggagaagttgtagttgcagatacaaaagaaaacttaagagttagagttgatgctgagtatggtgcaactgatggaaaattaaaattagctaagagagctaaagaattaggattagatgctatacatgatacagtacatgaaatgtgtaaagacgaagctagacatggtaaagcattcttaggattattaaacagacattttggaaaataataattaaaacatagattaaaaggagaaactttggtttctccttttttaaattatacaaataaactgttgtgatagaaggatggagataatatgaagtcggtatctgttaggagttgtaaaacttacaattatgaagaagtaaagttatctattgaaaaaaatttagaggatattggtggtatagataagtttgttaaaaaaggaagcaaagtacttataaaaccaaatttattaatgaaaaaaaagcctgaagaagctacaactacacatcctatggttgtaaaagttgtatgtgaaaaacttttagagttaaattgtgatattacaatagcagatagccctggtggtccatataatcaaaattctcttaagagcatttataaggcatctggaattgaagaagtagcaaatgaactgggcattaagttaaattatgatgtttcagatgttaagatacatagtaaaaaagcacatgttctaaaatatatggatattattaaaccaatagtagattcagattatataataaatctttgtaaattaaagactcatataatggcaacctttactggtggtacaaaaaacttatatggatgcatagcaggattgaaaaaagcagagatacattatagatttcctacagaagagttgttttgcgaaaatgtacttttagatatttgtgattatataaaaccaacattgacaattatggatggtatagtaggtatggaaggtgatggaccttcagctggtactactcgagaaataggagttttattagcatcacaaaatccatatgctatagatgttgttgcatgtaagattataagtttacttccaaatagagttgctacaattagaggtgctattaagagaggctatatacaagaagatttttcagatattgaaattttaggtgaagatataaaagatttaattataaaaaattacaagattccaaatgtaagtaaggatttaagattgttttccgtaaagctaccaaaatttttaaatgaacctatttcaaagcttataacaccaaagcctgtggtaagatttcaagattgcataaaatgtggaaaatgcaaggaagcttgtcctgcatccactatagagatagggactaaaggtgctattatagacttaagtaaatgtataagatgttactgttgccatgaactttgtcctaaaaaggctattgatgtcaaacgtaattttgtatttaagtatgtaaaataatgtataatattatatgagtctatataaattaaaaatataaaggagaaataatatgattttaattaaaaatggtagagtaatagaccctaaaagtcaaagagatgagaatattgacttaattataaaagaaaataaaatttataaaataggcaagtttgatgaaagtgatgaatatgaaaaaataatagatgctagtggtaatgtagttgctccaggtttagtggatgtacatgtacactttagagaccctgggtttacatataaagaagatatagaaagtggagctaaatctgctgctagaggtggatttacaactgttatatgtatggcaaatactaatcctattgtagataatgaagatacttttaattatgttaaagaaaagtcaaaaaatgcatgtataaatgttttacaagcagcagctataactaaaggttttgaaggtaaagagttagttgatatggaagctcttaaaaaagctggtgtaccagggtttactgatgatggattacctttaatggatagcaatctaattatggaggcaatgattaaggcaaaagagttggatgtaccacttagttttcatgaagaagacccttctttagttggaaatccaggtgtaaatgcaggaaaggtagcttcagaactaggattaaaaggtgcatcaagtgtagcagaagatgttatggtagccagagattgtatgttggcactaaagactggtgctaaagttgatatacaacatataagttcaggtgtatctgttgatatggttaggtttgcaaaatacttaggtgcaaatgtagttgcagaagcttcaccacatcactttacattgactgaggaagatgtattggagtttggaacaaatgcaaaaatgaatccacctctaagaagtaaatgggacagagataagattatagagggattaaatgatggtactattgaaataatagcaacggaccatgcacctcatagtaaagaagaaaaagatagagagtttataaaagctccaagtggaattattgggcttgaaacttctttagctcttggaataacaaatttggtgcataaaaatcatcttagtatgatgcagttaatagaaaaaatgtctataaatcctgcaaagttgtacaatttaaatattggatttatagaagaaggggctgtagcagacattgttatattcaatccagaagaagaatggacagttgaaagctttgtttctaaagctgataattcaccgtttaaaggtaaatctttatatggaaaggttaattatacaatatgtaatggggagattgtatataacgcctaatttaagattatttttttaaggcggagtgtacaatgattgaaagtaaaagattgtatatcagcagaatgagattgattaatcaaaattggaagtattagtttgaacaattagaacataacatcttggtaatttagatatagtaaggaagagaatcctttttatgaaagaacgcactattatatttggaaagattaagttcctaatctatcatatataatagtgcgttatatatttaagtatgttttatataaactaatctaaaaatcgaaaatctttatacaatttctacttataaattgcctttatagggtctagtttagaagctttaaaggctggaatcagaccaaatacaactccagtcaatatagtagctacaattgcataaaataagctatttaagctaggtatagcttcaaaacctatatatttagaaacatagttagtagcagcaaatccaactatagttcctaaaattccaccacatactgttataaaaacagcttcaactaaaaattgaaataatatagacctaggttttgctccaatagcacgtcttataccaatttctctttgtctttccataacagatacatacattatattcattacaccaataccaccaacaaacattgcaactacagttattatagatacatatttgtttacattggaattaatgctttcaagataagctgtctgttcagttgggtctggtgtagtataagaaccattgataccagggtgcatctcatataatttagctataacattgtttgcaacttcatttacattatagcctttagaagaaactaagtctaactggtaaatttcatttgaataagaattttgactcattaaagtgtcaaaagcctttttaggtactagggaagtagtaaattgcatatcttggtaacctccaaagaatcctccagcttggttttgctgagaatcatctaatacccctattatttcaaatatagttccatttatgttgataccatgacctaaggcatcttctggattttcaaaaatttcacttgtactttgtaatgtaagtaaaattacttttcttttttcatcatctaaagaaaaatctctaccacaaattaaatttattttagaatctttttttactggtccaacatcaacatacgtagtttttttatcaaaagatgcttgtgaagagtaaactgaatcaaggttaaacccatctcttgaaggagctattctttctactccttcaacaaatgataattcttctaaatcttttgcattaaagggttttaaaaaaatactcatatcatcagtaagacctgtgttatcggctgattcaaacgaaatagtagttttattagggtttacattgtttacagatttcttaatttctttttgaaatccattacctatagaactaacaagtattactgaagttattcctattataatccagagtaaagctacaaatacacgaagcttgtgaccttttaaattggccaaagaattttttaataaactcatgattacacctccgaagtaaacacaccatctttaagtcgtataaccttagttgcatacttagttaaatcttgatcatgtgtaaccattattatagtcttaccttgtttgttgagccttgttaaaagctccataatttctctgctagtttcactatctaatgccccagtcggttcatcagcaaagattatctgagggtcatttactaggcaacgtgcaatggctacacgctgttgttgaccaccagataattgaagtggtttctgcttaagcttgtccaaaagcccaacagaacttaatttatctttaacaatttcttctctattagatttttttagtgctttattgtaaattagaggcaactctacattttgatatacatttagagtttctattaaattaaattgttggaaaacaaatccaatattaatatttctaaaaacagaacgttcattttcactcaaattagttacatctgttccatcaaatatatatcttccttcatcaaatacatctagaaaacctaagatattaagtaaagtagttttaccactaccagacttacccattatcatgacaaattctccagattcaatttctaaatttaaggattttaaaacatgtaattcatctttccctactttgtaatatttttgaatattttctaatttaattaacatatgtaaattaattcacatccatagtaacttcttctacttttttgtttggagtagtatctccattattagaaccagcagttacgccatcgccttgaactgggtctccttctttcatttctttagtagggtgttttattattatatcgccttgttcaagaccgcctctaactacagcaaaatcatcattttgacttgctacatctacaatttgctttttcaatataccatctaaatccttaaatacatatgagtgtttgttgtctttaagtacacaagatgctggtattttaaagcttgaattagctacttcaagtgatgcttgaagatggaatccatttactaatccttcttgattatcaaatgctatgtttatatcataataagatagtgtattctgctgagctcccatttcagtatttggagtagatggtttatcagatataaaacttattctaccagtaagcttttggtcagttgaaaaaactagtatattgaccatttggtcaatcttcattttaggtaaatcttgttcacttgcttgtcctttcatataaaactctagaccttgaatagtcataaatgaaactggttggtctggatttccagtttggtcattcaagtatactgtgccatcaaaaggagcagtaactctgtcataagcttttttatccagagaagctatctgagagtttaaagcagttatctgtgcatttatagaagcaatagcatctttattttcagcaatatcagaaagtgatattttttgttttttgtattgactaagttgtgattttaaactatctatttctgctattatagttggatttttagcagtaaaaagaaggtctccttgatttactttttgaccatttgtaacattaacatcacttaactcataatctccagatatattgaagtccttagtttgcttaggaacaaccatcccatttataaatattttttcattttcaggaatagtatatgtttcgataaaattttcattagcttgtaattcagtgtttttcgaatcaacataagcaagaactcctagaattaaaagtatgattactgctattcctgcatatattttgaatctcttatttttaaagggattgtttttaaaacctttatttttagacttgaagccactacttccaaaactgctatttctaaagttgttacttttaaaactgttatttctaaatcttttatttttaaatttttttagaaaagacatgtcttcctcctttttataaaaactacttaattatatactgggatgtacatatagaattactataagaagttgaatataagttaatgaaaataaactatcaataataagatactataaatcacatttgaatgtaatagtaaattttgtatattggttgtactctgaatctacatcaattttatgaccaagcttatcacaaagttcttttactaaataaagcccaagacctgtagatttagaattgtttcttccattattacctgtaaatcccttattgaatattcgatttaaatcttccttttttataccacaaccagtatcttccactcttaattgtaaataatttttggttcttttgcaatagatagatatattatctcctaatgaggagtattttagggaattactcaataattgctcgaatatgaagtatagccatttttcatcagataaaaccttaaaattcaaattatttaagtctaaaataattttttttgaaataaaatattttgagtatttttttataatatttctaatgattttttcaatatttacctcttgaattaaaaaatccttatgaaaatcttcgagtcttgataaatataaaattttttcaacggagttttcaattctaaatatttcactatctatgtcatctgaaattttttcattaattaaattttcattttgttcaagaatgagttttattatagctataggtatctttacatcgtgtacccacatatttaaaatctctttgttttcttcaaatttctcgatattattatttattatgttattacattgatattgatgatttttaataatgttcaagtatattttttcttcatttttacatctagctaattctatatcattcatattaattttgaatgtatcattttttatcttatctaaaaatttgttcttcttgatgtagctaataaatagatataaaaataaaaacacaacatttacaactaatatatataaaatagtatcagtcagaaaaacatctacaggagaaaatataataactgatactgtaaaaattaagaaagtaaaattgtatactaaaaaacctagtttatccttgagaaaatctttaaagctcataaattcacctacttagaattgttttaactgattatataacccaatcctctttttgtttctataaaatcttctaaaccaatttcatttaattttgagcgtattctatttacattgacagttaatgtattatcatctacaaaccaatcattatcccataattttttcatgagtttattcctacttactatctgccccttatatttcataagctcatgaagaattttgatttcattttttgttagctcaatagtattatcttcatagtttattgttgcagttgataaatctaaagtaacaccattgtgaataatctgatttgagttattatcaacaaaattataagttcttcttaaaagggcattaactttagctactaagacatctacagaaaaaggtttttgtatataatcatctgcacctaaatttacacccattattacatccatattagaatttcttgaagaaataaaaattataggaacttttgaaatttttcttatttcattacaccaatgaaaaccatcataaaatggaaggtttatgtccaataaaactaattctgggttatagtttttgaactcttctattatattttcaagattttctatttgatgaacatcatgtccccatttagtaagacactttgctatgatatttttcaatgagacgtcatcttcaactaccattattttaaacattcttacctcctaattcaaaatagttatattaacataactatattctacttgataaattaaaatatttctaccttattacctaaaataattatattaatataactatattttacttgataaattatattttaaacataattgcaataaatttgaagaaatataattaatacttacgaaaatgtaaccttaaattaatataattaaatgtttaaaagccattttaatatatataatatatttgtgagaattgataaataactaattgtgatgaaaggtgattattaactatggaagaaatattatctgttgaaaatataaaaaaggagtatggaagaaaaggttcaaaacatgaagctctaaaaggaataactttcaaggtttataaaggagaatttgttggtattatggggtcttccggtgctggtaaatcaacacttttaaatattatttctacaatggatttaccttcatcaggagatatttatataaatggaaagaatactattaaaatgaagcaaaatgaattggcagattttagacgtgataatctaggctttgtatttcaagattctaatcttttggatacacttacaataaaagaaaatataatgttgcctctttctttaaaaaatgaaagagtatcagtaatagaaaatagaataaaagagatttcaaaagaattaaatatagaatctatattagataaatatcctggcgaagtttctggtggacaaaagcaaagaggagctgtatgtagagctatagcaacaaaaccatcattagtacttgcagatgagcctacaggagcattagattctaaatctgctagggatttgttgaattgtctattaaaattaaacaaagacagcaataaaacaatattgatggtaactcatgatgctataagtgcgagtttttgcaatagaatactctttataaaggatggaataatattcacagaaattgtaaagggagaaagtaacagagagttctataataaaatagtaaatacagtttccttaattggaggagttaataaaaatgactttatttagaattgcaatgcaaaatgtaaagaatagtttttttaattatttaatgtactttatttcaattgtatttagtgtatttgtattttttagttttaaatctatagagtataatgaagcgttgagttcacttggagaaaaaactaggatgagtattaatacaagttcaattgtaatagtggtatttgtatttttatttatatattattcaaactcattttttttcaatagacgtaggcgagaagtaggaacttatagtttacttggaatgaggaaaaatcagataggaaaaatatttttatatgaaacttttttgatgggtatagttgcaatactaataggtatatttttaggactgttattttcaaagcttatgactatgatgcttgtaaaattaatgaatgaaatgatagtagtaaatatgaacttaagtataaaggccttagttaagacactagcggtatttttaataatatttatagttattggaataagaaatactatagttatcagaaataagagaattatagagttatttaataaatatccagaaaagtataagtttaaaaaatttataaagttaaaatgtgtacttggtgttttattaatagctatttcttatttaatgtcaattagttattttattgctgaaaatattatgctttcagtttttatattagttacaataatacctggaacttttttatttttttcatcaactatgtatatgattattgatgctgttaagaagagaaaaagtttttattataagggacagaatttaattgcattttctgaacttggatttaaattaaagagcaatagtagtgtattggctgtaatagcaatattaatagctacgagtgtaactatgctagggtttaccatatcactttattacgatatagataggaacataagtgaaaattataaatacagttataccataaatttaggaaattcttatgtaaataacgaaattgacaaattattatataaatataaaaaagataataagataatctttgataaaacaatagaacttatagacaaagatataaatattgaaatgtattataaaaatggaaatagttatatagaagatagaacttctgtagatattattagagaaagtgattttaaaaaattaagacaatatcagaataacaattatgaagaattaacttcaaaggaatctgtgtactatgtttctgattcatacaaaaaaatgttttttaaagactttgagattgaaaaaataaacttgtatattaaagatacaaatgagtatgatataaatctgtttaaggtacaaaaaagcatcttggagccagaaataaattcacaagctacgtttgatttaattgtagtaaaagatgacgtatttaatcagttaaaattacatggaaattctagattaataagattaattgatataaaaaatgaaaaaaaagaactggatttgactttaaaatttaaaaatatagtaagtgaaaatatgaaatttacttatccttttaattttacatcaagtattgaaagttataataacttgataaaattaagtggtctaatgctgtttataggcatatttttgtctgtagtatttcttttatgtacaggtagtataatcttatttaaacaattatcaaatatatatgatgataaggaaagatatattatgttaataaaacttggagcaaataataaagatattgagaaaataatatcaaaacagttaaaaattatatttttaatgccattagttgtaggtacagttcataatttatttgctatgtctatagcacaaaagtttataccaaggtcattacttgtaccaattatcataactctagtcatttattttataggatattttatatattattttttaactttaaaatatgctctaaacatgataaaagaataaattatttttaagtcaaaagaattagatatatgttttgaataaaataacttatttaagtgcagatagaaaatactagaattgagtttaagatatttatttaaagataaaattaaagttaggaaaaagtctatattttatatcattttgtatcagttacattacttgatgttatataataaatctaagcagaatatcaaataaaaaatgacgaggagctgaaatttatgaagtttaatgcctaccaacataaatactcatcaataagaaatgtcgtgtatgctaaaaatggagcagttgcaacatcaacaccattagcatctcaagctggacttgaaatactaaaaaagggtggaaatgctgttgatgcagcagttgcaacagccgccacattagcagtagtagaacctacaagcaatgggattggaggagatgcatatgcccttgtttggatagaggaagaaaaacgattgtatggtttaaattctagtggctttgctccagaaaatatggaattaaaaaattataataatatgaaagaaatgccaaaatatgggtttggagcagtaactgtacctggaatacccgcagcttggtcagaattaaataaaaaatatggtaaacttagcttaatggaatgcttatctccagcgataaactatgcaagagagggatacgtagtatctcctaatgtagctaaggtatggaaaaaatcatatgaactctatgaaaaagaacttattggagaagagttcaaaccatggtttgatacattttctaaagatggtaaagctccagaggctggagatatatttatatgtgaagaacaggcaagtacattagaagagatagcaaatactcaggctgaaagcttttatagaggaagacttgctgataaaatagatgaatattctaaaaaatttaatggggctataagaaagagtgacttagagtgtttttatccaacatgggtagaacctataagtacagaatataagggatataaaatatttgaaatcccaccaaatggtcatggaataacagttttaatggcacttaacatattaaaagaattggaattagaaggaaatatagaaaatgtagaagacatacataaaattatagagagtttaaaattagcttttgcagattctaaaacatatgtaactgatatagagcatatgaaggtaaagattcaggaattactaagccaagagtatgccaaaaaaagaagtttattaattgacaataaagaggctttgtatccaactgcaggagagccatattgtggtggtacagtatacctttgtactgcagataaggatggaaatatggtttcatatatacagagcaattacataaattttggttcaggaattgtgataccaagaactgggattgctttacatagtagaggaaataattttaatttagaccctaaacaccacaatgtagtaaaaccatttaaaaaaccttatcatactataatacctggatttttaggtaaagaagataaagcaataggtccatttggtgtaatgggagcttttatgcaaccacaaggacatattcaagtgttaacaaatatgattgattttggattaaatccacaagaggcgctagatgctccaagatggcagtggataaaaggaaaggaaatagaagttgaaccagagatgccaaagcatataatagattcattaattgaaaagggtcatgaaataaaagtaattcatgatactgtcgacatgggacgaggtcaaataatatttaaaacagaacaggaaagttatatttgtgggacggaatcaagatgtgatggtcatattgcagtttattaatattatcaactaaaatatatataataaatttaaagagtatatgaaataattagtaaaggcgaaagtctacaatgactgacgcctttacaaaatttaagctatcatatgctgattttatatagattatgagccttattcttgaccagttttgatttcattgtcatcataactaatccagtcactaaagctaccaatataaatcttgtgaggtatatccagttctctaagagcaagactgttaacacaagcagatatccctgaaccacaagataaaattacttcatcataattatttaaatctttaaagaatttttttaaaaattctatatctttaagtgagccattttcaaagtcactttttattaaatccttacaaaaataattttttgcacttggtatatgaccagcttttgagtaagcaggttcaactaaaccctggtatctctcattagcacggcaatctattattacagtatcttttttgtataatttagacttaacatattccattggaacaactaaatcattgtttatatttggtctaatttccttacctgtacaacttggtatattcactttctcttccaattctccaccttcctttacgaaagatgttattcccccatctagtacatagacatttttaagccccaaatgttttaattggaaaaataatctgcaagctccatttaaatctccatcatcataagttacaatcgtagtgtcattatcaacacccattttttctaatttttcttttagtattaaagggtcttgtaaaggatttttaccaccatgttcttttgtaggagatgataaatccttgtctatatctaagataaaactgcctttgatatgtccttttttataagaatcaataccataagttctattgataagatcaaatctgcaatctattacaactagattatcatttttttctagttttgatataagttcttttgctgaaataatgtttttcaaagaatgtacctcctatgtttatattatctttattttaatttatattaattattaactttataaactaatattattataatttattacataagtaaataaatctttagaaattgtaaaaattttatataaaaattcaaataattaatgaatattgaaaattttagatatataataaaataagagtatattttatataatatgaaagctggtattgcaatagattaaagccttatacacgtttagtttttaaagaaattagtgttattatgaaaacctaagttaatttattaaataaataattgaataaaaaaattttattatgtatttataaaatttttgttacaaatttggcataatatagtatactttaagtgtgtattaggttaaatctataacaaattagacgtatgatatagacttagtgtttattggcatttacaagaaatttgttaatatcaactatttgtagtttgggcagttataattactataggggggatgtccaatacaaaacaatcaaccaagaactaatattatattataaagagttatagttttgtgtgtttatgtttttaattaaatttaaagtgggaaaaatatatttgttagaatggagaatagcgagatgagtaataaaatagttagtaagagacaattaacagatagtatttatttaatggaaatagaggcacctagagttgcaaaatcttctcaaccaggtcaatttataataattaaaaatgatgaaaagggagagaggattcctcttacaatagctgactatgatagagaaaaaggaacagtaactattgtattccaaacagttggtgcttcaactaaaaagttagcaatgtttgaagaaaacgattttgtaatggattttgtagggccattaggacaagcaagtgaatttatacatgaagatatagaagaattaagaaataaaaagatattatttgtagctggtggagttggttctgctccagtttatccacaagttaaatggtttaaagagcatggattagatgtagatgtaataattggtgcaagaactaaagaattaattatattagaagatgatatgaaaaaagtagctaaaaatgtatatgtatcaacagatgatggtacatatggatttaatggaagagttacagacctattaaaagatttagttgataatcaaggtaaaaaatatgaccaagcaatagtaattggaccaatgataatgatgaaatttatgtgccaattaactaaagaactaaatatacctactatagtaagtttaaatacaataatgatagatggaacaggtatgtgtggtggttgtagagttagtgttggaaatgaaactaagtttgcatgtgtagatggtcctgaatttgatggtcatttagttgattttgatcaagcaatgagaagacagtctatgtacaagactcaagagggaagagctattctaaaacttgaagaaggcgatagtcatcatcatagtaattgtggatgtggaggtaacaaataatggatgctaaaaaagtaaaagtaccagttagagaacaagaacctgctgtgagagcaacaaattttgatgaagtatgcttagggtataataaagaagaagctatggcagaagctaatagatgtttagcttgtaaaaaaccaaaatgtgtgggtggatgtccagtaggaatcgacataccagggtttataacaaaaattaaagaagatgatatagaaggtgctgctaaagtaatagctaagagcagttcattaccagctgtttgtggtagagtatgcccacaagaaagtcaatgtgaaggtgtatgtatacttggaataaaatcagatgctgtatcaataggtaaattagaaagatttgtagcagattggtcaaaagaaaatgacataaatttatctgatacagagcctaagaaaaatcaaaaagtagcagtaataggaagtggtccagcaggtctagcttgtgctggtgatttagctaaaaaaggctatgatgtaacaatctttgaagcaatgcatgagccaggtggagttttaacttacggaatacctgagtttagacttccaaaacaagctgttgttcaacctgaaatagacaatataagaaaattaggtgtaaaaatagaaactaatgtaattgttggtaaaacaattacagtagatgaacttatagaagatgaaggatttgaagctatattcataggttcaggagctggtcttccaatgtttatgaatataccaggggaaaatgcaaatggagtgttttctgcaaatgagtttttaactagagtaaacttaatgaaggcttatagagatgactatgatacacctattagttctggtaaaaaagttgctgtagtaggtggtggaaatgttgctatggacgctgctagaactgcattaagattaggttcagaatcatatatagtttatagaagaagtgaaaaagagcttccagcaagagctgaagaagttcatcatgcaaaagaagaaggcattatatttaatacattaacaaatcctaaggaaattttagtagatgaaaatggatatgttaaaggtatggtttgtataagaatggaattaggagagccagatgattctggaagaagaagacctatagaaatagaaggttctgaatttgtacttgatgtagacacagttataatgtcacttggaacaagcccaaatccactaatatcttctacaacaaagagtcttaatataaataagaagagatgcttaataacagatgaaaatggtcagacttctaaagagggtgtatttgcaggtggagatgctgttactggagcagcaacagtaatatctgcaatgggtgctggtaaaacagcagcagcatcaatagatgaatatttaaaaacaaaagttaatgcttaatttgtaaattaaagagagggtgtctcaaaatgaactttttagttcatgaggcactttttttgtacaaaatcaaatatgttttaatcatttcaacaatgaaaatttcattcctgtagaaagtctaacttttaagtcttagtacaatctctattttgatgtaggcacttttttagatggtttaataatttatcagttattattgtaatatttgatactaagtaacataactttgtctaactatgataaaatagttatacaataaaggtcttgtaaggagtgaataatgtgtggctaataaaatcagatttgtcaaatctaacattaaataatagaaaaataaattgtgtaattaatggtattttaatatgaaaaaaagagaaaaagtatttgatgggctagtttttaagcatatattaatcttattaatactattagttttgattgatttaacaagtaccatcatatatgcaagtaactctatggaaattacttctagaaatatgattgaggcatcaaaaagagaacttgaaaactatttagaagtaaacatatctttattaaaagctcttagtcaagatgatagattttctaatggtgaaacatcactaattgaaaagggaaaattattaaggccatatcaaaaggaatataatctttttatgattggtataacagatacaaaaggaaatgcttcaagtacatatagggaaaatgttaactcaataaaagataagcctagttttgagaaagcaattaaaacaaagcaagtagtagtttcagatattgaagtcagtaatgtaacaggtgacaaagtatttatcatatatgtaccaattgtaaaaaataatgagatgattgggaccatttttgcttctttttattttcaagatgtaaataatttaataagtagaagcaattttgatgattctattaaatttctaatgatagataaagattatactattatttctcatccaaacaaaaaatatgtaaatgataaaagtaagatgcttgatttagaagggaatattataggaaccactaaaagtgaaatcttaaaaaatataaataaaaaatgtcaaggtgattttttatcttgggataattggagattatataatgtaaaatatacgaacataaagtggactaattggactttagtatcaaaatgtaatatatttaagaactttaaaaatctaatagttaattttatgataaagttgtatttttatatagtaatatttatgatattgtggaaattaagtaatgctaaattaatagaacaacttaaaaaattggcttattatgattctttaagtggaataaaaaataaagaaaagtttagaaaagattctatgtatattttaaagaattattatcaagataatttttacttagtacaattggatgtcaataaatttaaatatataaatgagatgtttggatatgctgaagggaataagatattaattcatatatcacaggttttaaataataatacaaataaatatgaaatttgtgctaggatggataatgaccattttatattgttgattgcttgtaatactgaagatgaacttttaaatagattatctaaaataaataaagaaatttgtaacttaaatactactaactcatctaagtataaaattgttatgtcaagcggaatatataagattactaaaaaggatgatattaaaaagattgacctgttaattgatagagcaaatattgcagcaaaaagtaaaaaggaaaaatatgaacattcatattcgttttttaatgaagatacaagaaatcgattgtacaaggaaaaacgattggaagataatatgaataaagctttagaaaaaggtgaatttatagtatattatcaacctaagtatagtttagatgatgtaaatgaaattgaaggagcagaagccttgataagatggaatagtccagaatttgggtttatttcacctatagattttgtacctttatttgaaaagaatggttttattgtaaatattgatatgttcgtgtttgaagaagtatgcaaaacattaaacaagtggataaataaagggtatactcctgtaccaatctctgtaaatatgtctagagttcatttatatagggataattttatagaaaatataactgatttgataagtaaatacaatatatctcctgagtttattgaacttgaactaacagaaagtgttgtgtttgataatttaaatatattgattgatataatgaaaaagattaaagagataggattccttatatcaatggatgattttggttcgggatattcatctttaaatctgttaaaagacctttcttttgatattttaaaattagatagaggatttttaatcgaaacaacagatacaaaacgtggaaaaattattatttctaagattgtggaaatggcaaaagcgattgatattaaagtaatctgtgagggcgtagaaacttatgaacaagtagagttcttgaaagagataggttgtgataaggttcaaggatacttatttgctaaacctatggtattagatgaatttgaaaaacacttaaactttaaatttgattaatcattaataattattagactataatataccctaacaacttacttacaaatatgtaagttaattgttagggtatttttatggttaaagtagtatattcacgatattatggtattgtagtaaaaataaaaaattatggagaatataaaatgaacatattgagtattagaaatatatcaaaaacatattgcggaaatattccatttaaagcattagataaggttagtctaaatatagaaaagggagaatttgtgtctgttatgggaccatctggaagtggtaaatctactcttttaaatataatatctacagttgatagacagagtgaaggtgaggttgtattagatggatatgatgtaagtaaattgaaaggagaaaaacttgctgaatttagaaggaaacaacttggttttgtatttcaggattttaatttgattgacactttaactgttggcgaaaatattatgttgccacttacactagagggggcaagtatcaaagatatgaatatacaaactaaaagtatatctaaatttttaggaatagataaaattttagatagaaaaacctatgaaatttcaggaggtcaagctcaaaggtgtgctattgctagagctattataaataaacctaccatacttcttgcagatgagccaactggaaatcttgattcaaaatctactgatgatgttttgaaattatttactaggataaacaaagaacaaaatgtaacaacacttatggtaactcatgaagtatatagtgcaagttattcagatagagtaatttttataaaagatggttgtatatatacagaaataaaaaaatctgaaagcagtaattctttctattctgatatactagctgttttgtctcaaataggaggtgtaagatagtggattttagaaagtttgcttataataatatagttagaaatttcagggcatatttagcatattttttaagttctgttttttctataatgatattttttgtttttgcagtgtctatgttccatccgattataacaaaatctggaatgcagagtggttctactgcatttatggctcttatgacttcagaattaacaatattaggttttagtctactttttatattgtactctttaggaaatttcttgaaatatagattgaaagattttggagtattgatgataattggaatgagcaacagacaactgaaaaaattgatattaattgaaaatttgataataggatttttagcagtgatgttaggaatattacttggtttatcaatttcaaaattgtttttattgtatttaagcaaactgttttatatgaatttaactgaaatttattttccagtaaaagcaatactattgactattgtatcatttatgattttatttttgataacaggaccaatgagcttaaaattattgagaaaaaagagtattttagagcttttagtaggtacaaaaaagcctaaaaaagagataaaatcttcaaggctatttggaataattggtgtaatatgtcttatattaggatatgctatgatactatttggcaataagttaaaaataaatggaggtatgtatacaacagcactattaattactttggggatatttttatttttttctcaatttactattttgatattaaagtatttaaaaaataaagaaaaattttataagaacaaagtaaatatgttacttataagtaatttgatatataaattaaaggataatacacgattgttatttttaataacaatacttttatcggctactttagtagcatttacaacaacttcaacacttgtaagttctcaaggagaagcttctaaaaataatttcccaatggtttactcatatttttcagagcataataatgaaaaagaatatgaagaactacaacaaattagagaagcaatcaaaggatatgattataaggagttaagttttcctgtacttaaatataatagggaagtcttactaagtgtaaagaattataacaaattatcaaaggaattgggattagataaaattagttcaaagttagaaaaatatgaagggattataattcctagtagcaattcacaagaacatataaattctttaaaacaattaaaaaattatagtataaaaaatttaaatatagaagtaaaaaaatcaaaaaataaaataatttttcctacaggactgtttagtaaagttgtagttataagtgatgacttatacgatgaagtaaaaggtgaattttcaaaaattaattttcatggatttgattataaaaactggcaaagcagtgcaaagataactgaaaatttaaaagaaaaacattttaatttggatagagaatataacaggtcatattttttaacattaccagatatgtatttagtagagttacaacaaagtaaaattcttcaatttatgggtgtttttataggagtgatattatttatagcagtttttagttttttatacttcagattatatacagacgagatagaagataatgtaaagtacaaaaaactatcaaaaataggtctatcttttaaaaatatgaataagattgttagtatagagataggtacattgttttttataccgtattttatagcaattataaatagcataatttctttactgtttttaaatcaagtattaaataatagttttaggttagaaaatttgggtatattactactgatatcatctatatattcactttatttttacttattaaaaaaaatttatactagaaaagtttggttttttgattaaagtggtatataatagatatataaattaatatttaaaaagtagttaatattaggggagggcatttgcacctcccttgtaatatgtggaaaattgaatattagaagaaggaggagacttgatggaaaatcaacaattattaggaacagaacgaattagtaaattactactaaaatattctataccagctataataggtatgttggtaaatagtttatataatgtagtagatagaatttttattggaaatataccaggggttggaccacttgcaataacaggtcttggtgtaacaatgccaataatgacaataatacttgcatttgggatgttgataggtataggaactactactaccatatcaataaaacttgggcaaggtaaagtagaagaggcaagaaaacttataggaaatgcaatgacgttatctgtaataacaggaattatcataatgatacttggaatattatttgcaaataaaatacttacattgtttggagcaagtgaaaatactttaatatatgcaaaatcatatataaatattatattattaggtacagtagtaaatcttctttccttttctttaaaccactcaataagagctgatggtagtcctaaaatttcagcaggaataatgatagtaggatgtttaactaatatagttttagactggatattaatatttggattcaatttgggaatacaaggagctgcaattgctacagtaacttctcaggctcttacagctattttaactatagggtattatataagtggaaaatcaaacttacgattcagtaaatctaatctaaaattagataaaaagctaataaaagcagtgtttgcaataggtatgtcgccatttgcgatgcaacttgcagcaagtttagttcaagtaatatcaaatattgcacttaaaactcatggtggagatttagctataggggctatggctactatttcttccattgcaatggtatttttgatgcctatctttggaataaatcaaggagcgcaacctattataggtttcaattatggagctgaaaaatatgatagggttaaaaaagcatatttaggttcattagtagtagctactataattttatgtatgggtatggtagtagttatgcttttcccagaagctattataggtatatttaataaagaccctgaacttatgaatatatctgttaatggattaagaatatacttacttatgttgccaattgtaggcttatcagttacaggaacaaactttatacaatctataggaaaagcaaaaatggctatgttattgagccttttaagacaagtaattttattgataccagcagtattaattcttcctacattcttaggtttacagggtgtatggacagctcaaccagtgtctgattttatagctacagtaattacaggtatagttgtatttagagaattaaaaagatatactcctaaaactgaaaaattaaatgaaaatgaaagactaaatgagataactactgagtaaaaatataaattcagataattgagcaagaaattgcaaaaaatacgattatatgataaaataaaaccgctgtcaaggataagagaaattctaattatggagtgattttatggaatttacaaagaaaagcaaattaaaaaatatgtatgtaaacatgaatgtagctagaatgttgtctaagataaatgagtataagggtaggcaactgctttacaaaaaacaaccaaaagaaattttagaaaacctagaaaaaaaatctttagtagattgttctgaatctacatacattggaaatcaaagagatagtagtaattttaatctagaaaagttgataagtaatgaagttacacctagaagtagagaggaattgagtattgttgaatacagagatgtggtaaaaactattaacagtgcttatgagagtattcccatcagttcacaaacgattcttgagcttcatgggtacttatataaattttcatctactagaggaggaagttataagtcagataatgattttattgaacacaatttaaaacctagcgaatttataagtattgattcaagtgtcaataaagttgaaaaagctgtagaagaaatatgtgaagcttataatacattgatagaggaagatgaaattgatatattaatattaatttctgcatttgtgttagatttcatattgatacatccattcaaagaaggtaatataaaaatggcgagagtacttatcctattgttactaaataaaaatgggtatgaagttggaagatatataagtttaggaaagatatttgatgatagttcatatgaatattatagtaatttaaattatttgaaagcctcaataggtagtgaaaaagcagatatgaatgcatggattgagtattttttagagacgatattaactgcatatgagaagctggatgatagtttaaatatatctgataagaaaagacaaacaaaaactagtagaatagaaaaaataataaattctacccttggatattttacaaaagaagatataagagatttatgtcctgacattccagaacctactataaatagagtttttaataatctaagaaaacaagataagatagaagttgttgcaagaggaagaagtgcaaaatggaagaaaaaatattaaaaaatgtttaaataactaaaatggtatagtgttttacactataccatttttaatgtcattagcatgagcaataatttaacaacttaagcaatatcaattttatttattgattatttttgaactgaaaaatggggttatatggtatactacaataataattaattttggatgagaatatataacgttacagaatatcttaggagtatatgtataaaaaatataataaaagtgtgaggtttagtaattaacaaattatgtggcttcacacttttttataaaataaaaatacttagcagaagaatattttagttgatatgtttataagatagtacttgtttgggtaaaagtataaatagtaaaaaagtagaagtaatgtgtataaaaacataagttacattctgtaataatagttattttataattcaacaaaagaatagaatgggtatatttgtgaaataataatataaaataatcttaggagtgatcttatgaagaaaaaattattatatataaatgtaaattcaaaacctgaagacttatcttcaagtaaaactgtagcaagaaaatttataaataaatttatggaaaaaaacaaagattttgaggttgaagagatagacctttataaagaacatataccgagacttgagtatcagtactttgaaaaaagaaatagcatagttagtgaagaaaatgctaaaaatttagacgataaggatagaaaagagcttacaaagattagaaatctttgtgaccaatttgtgagtgcaagtgtttatgtaatagcagcacctatgtggagtttatcttttccagcaccacttaaagagtatatagattgtataattcaagatggaaaaactatatcttttgaaggcaatgataaaccacaaggaattttaaatgatattgatagaagtatggtatatatacaatcttctggtggacacataccatgggtcttgaagccagttatgaataaagggttaaattatgtggaaagtattatgaaatttataggaattaaaaaatttgatgaattgttagtagatggaactggaactagtgaagaagaaagacaagctgcaatagaaaaagcatctgaaaaaatacatggtataatagatggtatgaaattttaattataatattttattaaaaatataaaggaaaaacctcttttaatgtagaaacttatattgaaggaggcgagaatcatgcgagaagaaaaaagtaatgaaaagtatgattgttattggtgtaatcaagaaaataatttctgtgtagaaataaaagataatatagtaatgatagatgatggcactggtacgttaaaacaagccgttttcatagggtataaacaaatccaaattaatttaaattgttcacattgtcaaaacttaaatagaataaaattaaatttgtagaattttaaaatggaaattattgaaggaattaaaaatagaaagtgttaatatttagactgaaaattatattttatacaataaaagtttatttaaataacattgtattttaatatttattttcagtcttactttattaaaattattttttggttatgtctggaaaatatctgtctactaatttttctgaaatattttttaattggtcagccattgaagtcagacttaataaggctatcaataaatcatctttattttctggatttatactaatattttcaaaattagactctataaagtccggtatattctttctttgattttcttttattaacatgaatttttcgtaacatgaaactaaatctttttcactgaaattatccttttcatacacaccatgtaagattcttttaatttcttgtattgtaagtgtatttttcatagaataaataattatcatctgtaaaatttgttctttagtatacttttttcccttaactggtttgattaatccctctttgctgtaattatttatcatggttttagtaagaattttatcactttcaaatcttttattaggagaaagtttattgtcaattagagaaataatttgatccatatataagtcaatagagggaatatcgtttgaagttatatctgcattatttagtgtttctagtattatagtattaagttcattattcatcatatgttacctccataatatatataatacactaaattagaaagtaaaacaatattaagacttgtaaaaaaaacataaagtggtataattaaatatataatatagtaatgaaaactatatttatgaatctgatttttaaaatacataattgtaggaggacgaaatgtatcaattttttttaaagggtagagacccaataagcagtttaactcattttataggtgcttgtttatctcttttagcaactataattttagtttttcaatctgttacattacaggaaacttctctcttgatgatagtatctgtatcggtatttggactttcactaattgctttatatagtgcaagttcgtattatcattttttaaaggggacaccagaacaagaattgttttttagaaaagtagaccatgcaatgatttatgtattgattgctggctcttatacaccaatatgtctgaattttatggaaaaaaaagaaggcataatatttgttacagcaatatggatagttgcatttattggcataataataaaaatattttggatggatgcacctagatggttatctaccagtatatatttacttatggggtgggcaattgtttttgatataaatgcattcaattcaattcctaaggattgccttagactattaattatggaaggtgtatcttactctataggtgcaattatttatataattaaaaagcctaatataagtcctgagtttggatttcatgaaatatttcatatttttattatgataggttctttatttcactttttagcagttttattgtatgttttatagttttaaaagatttgattaattgatactaaaattctacaatgaataaaatggaactgccttatatagattatatcttcgacaataagacagttccttattataaatattaaattctacttataataaaattttgataaaaatagtccattcaaaatgcctattccataattcctttaatgtacttttcatttacgacatatagtttgaatttatgtactataattatatcctctaaattctctgaaacactaacaattctgacacatttgtttctaatttctacaggtaaatctaaatcatttgttaaattcacatagtcatcatatttatacataaaatcatccctttacattaagatatacttattatactatattttaataagtttttttaaattattacaatttttcccgaaatttcattttttatacataaaatttccaaattaggtaaagattaaattttttattgtataaacaaaatttacatataaaatattttattcaaatttttaaataactattgccaatttttgaaaaatatattattattaatagtaataaaaaactgtaaatttagaatattaataaaaattatttgggaggaaattatcatggtgagattaaatatagtaaaattaaatacaaaattaaatcatcaccatcatcatagattaaagggattgtaatatgaaattaattcatagacacaagccctgtttttagtgtaattggtcttgtatctatgatgggaagtaattttaggagaaaattatagccatataggtataaagcctatatggcttttttattgttttaaatttgcaaatataagagtaaatttaatgaagagggtgagaatgtgaaatttttgaggattgaagatgaagttatttattctaaaaaaagatataaattaaaaagggaaatagataaactttttttggatgaagaatattttcaaatagaaccacaattatttgaagaatatgatgaatttacaactataaataataaaattccagaagaatctatggtaaaggttgtaaatggaaaagtaatggtacttagagctgatataactacaagtataataaaaagccttgtaccaagatgggaagatggtttaaagcttaagcttttttataattcatcaatatataaaaataaaaatacagttggaataaaagagataagacaaataggttgcgagtatctaggagaagcctctgtagaagcagatagagaagtagtgaaattagctcttaagatacttgaaaaatacaataataattttattttagaggttgggagtagcaagtatattcatggtttgttagaagaattaaatttaaataagaattgtgaaaatcaaattaaaaatttactatatacgaagaacactcatgaattaaaagtatatattgaagaactgaaaattaagcgtgaagtaaaagagctattatcaaatattttaagcttgcaagggaatttatacaacgttattgaaaaatcaaacaagttctattgtaataataagatgaagcaagctcttgaagaattaaagcaagtaaataatttaattgaggaatgtaattttttagataaggctagatttgatttatcaatgattactatgcttgactattatgaaggaattatgtttagaggatactacccaaactcatataaagaaattcttagtggtggaagatatgattctttaactaaagagtatggaaaagaaattccagccattggatttacactaagtgttgatgagttaatgaagtatgtatataagtaaagtttagaaggagggattgctttggattatttgactatagcactagcaaaaggacgaattgaaggggaatcatttaaaaaatttaaaaaaatgggtctaggagatagtatagacacagatacgagaaaactaatttttaaagatgaagaaaataaaattatatatatacatgtaaagccatcagatgtagttacatatgttgaaaaaggagtcgctgaccttggtatagcaggtaaagatactattttagagaatgagacagatgtatatgaaatatatgatttaggttttggaaaatgtaaatttgctgtagcaggattaaagggagatagcatatatagagaagatgaatatctaaaagtggcaacaaagtatcccaatatagcaaaaaagtattttaaagagaaaggtcaaaaaattgaaataataaaattaaatggttctgtagaactagctccaatagtagggttgtcagatgtaattgtagatatagttgagactggcaatacacttaaagcaaatggtcttgaaatattagaagacatatgtaatataagtgctagaattatatcaaatagagctagctatagatttaaatatgaacaaattcagaatataattcgtttatttgaagaacttgataattaaaatataattgaactttataaggagggatttaagttgagagaaaaagaaagtataagagagttaaggggatatgaaccaaatcacgtaaactgtaaagtaaaacttgatgcaaatgaaggaagtaagaggttgtttaaataccttattaaagaaatttcagatagtgatatagatttaaatttatatcctgaagattcttatagtgatttgaaagaatctataatagattacataaatatttctggagtaaataagaaaaatcttctagtaggaaacggttcaagtgaaataattgatttaataatacatacttttgtagataaagatgaagtaatattgagtttctctccaagttttagtatgtattctatatatagtcagataaatgggtctaaatttataggtgttgaaagtgatgaaaatttagttataaatatagataatgtgattgaaaaagtaaaggagaataatcctaaaatagtaattgtatgtaatcctaataatccaactggaacaatattaaagagggaagagataataaagcttttagattcaactaatagtctagtggttttagatgaagcatatatggattttggagaagaaagcatgttaagtgatgtttttaagtatgataatctaatagttcttagaactttatcaaaggcatttggattggctggaataagaacaggatatatgttatctaatagtagtttaataaattctgttgagaaagtaagacctccatataatttaaattcattatcagactttattgctacaagagcacttagaaataaagatgtggtaaaggcttatataaaggaagtaaaagaggaaagagaagttttatatgaagaaatgattggtatgggaattaaagcatacaaatcacaagcaaattttatattattttattctgaaatcgaaaatttatcacaaaaacttattgatagaggagttttaataagaaaatttggtggaaagttagaaaattattacagagttacaattggtgataaagaagaaaattctatgtttgttggagctataagagatattttgaaaaaggagaaataggtatgagaatttggaaggtagaaagaaatacttttgaaacacagattttagtagaattaaatattgatggttctggtaaagctgaaatagatactggaataggatttttagaccatatgcttaccttaatgtcatttcatggcaagttcgatttaaaagtgatttgtaagggtgatacatatgtagatgaccaccatagtgtagaagatataggtatagctataggtgaagcatttaaaaatgcactaggtgacaaaaaaggaatacgaagatattctaatatctatatacctatggatgaatctctatcaatggtagcaatagatataagtaatagaccttatcttgtatttaatgctaaatttgatacccaaatgattggtagtatgagtactcaatgctttaaagaattttttagagcttttgtaaatgaatcgagagtaacattacatatcaatctcttatatggggaaaatgaccatcataagatagaaagtatttttaaagcatttgcaagagctttaaaagagggtagtgaaatagtttctaatgagatagcatcttcaaagggggttttgtagaatgaatataatagtagactatggtcttggaaatatagattctgtgtctaggggttttagaaaagctggaatagaaactaaaatttctagtgatatagatgaaataaaacaggcagattcacttatacttccaggtgttggagcttttagagattctataagtgccttagataaactaggattgataccaataataaaggagcatgtttctaagggtaaatttatgataggtatatgtctaggaatgcaattactttatgaaaaaagttatgagtatggagaatatgaaggattaggacttataaaaggaagtattgataaactggatataactttaaaagtgccacatatgggatggaataatctaaaatttaataaggcaaatgatgatatacttaaatatataaacgaagatgattatgtatacttcgttcactcatattatgcaaattcatcaaatgaagaactagttgcattttcagaatatgaaaagaaaatccctgctattgttagaaaaggcaatgtatatggtatacaatttcatcctgaaaaaagtggagaagtagggttaaatatattaagagcatatggggagatgataaaatgataatatttccagcaatagatataaaagataataagtgtgtaagactcacacaaggagaatttgacaaagtaaatgtatattatgataatccattagaagtagcatataaatggaaaaatgaaggagcagaatatatacatatagtagatttaaatggtgctagaagtgaatttggtataaatacaaaaataattgaggatatagcaaacaatatagatatacctattcaagttggtggtggagttagagataagggaaaagtcaaaagtttaataaatgctggtgttactagagtaatattaggtagtatagcgattgaaaatttgaatttggttgaagaattggtcaatgaatataaagagaaaattgtagtttctatagacgctaaagatggaaaagtagcagttaggggatgggaagttgtaagcgatgtagactcattaacattatgtaaacaacttgaaaagataggtgtacaaactattgtttatacagatatatcaaaagatgggatgttgcaagggccaaattttgacatatatgaaagaatagcaaaggaaacgtcattaaatgttattgcttctggaggcgtaacttctatagaagacgtaaaaagactaaaagctatgaacttatatggtgcaataataggtaaagcgctttatgataaaaagatagactttaaggaggcacaacaattatgcttactaggagaataataccttgtctagatgtgagaaatggaagagttgtaaagggaaaaaaatttaaagatatagtagatgttgatagtccagaagtacttggaaaattttatagtgattgtggtgcagatgaacttgtattctatgatataactgcatcaaatgaagagagaaagacatctttagaatttgtgacaaaagttgcagaaaatataaatataccattttgtgttggtggaggagtaaataaattagaagatttcactgatattttaagaaaaggtgctgataaggtttctataaattcatcagcagtcaaaaatcctgaattaataagggaagcttcattaaaatttggagcacaatgtgttgttttatcgatagatgcaaagaaaaatgaagagggttcatggagcgtatacgtaaaaggtggaagagaaaaaactaatctggatgcaattgaatgggctgttaaaggtgtagaacttggagcaggagaaattgttgtaaatagtatggacgaagatggaatgaaaaatggatatgatatagaattattatcaaagataacttctttagtaaatgtacctgtcatagcatctggaggcgctggaaaaaaggaagatttttatgaggcagttaataaatctaatgtagatggaattttagcagcatctgtttttcattttggcgagataaaaataaacgatttaaagaaatatttaaaaaacatgggtgtagaagtaagattataagttaaatactaaaaggagattagaaatatggataataagtgtaacaatgtatacagtgatgaagtagaggaatttataagaagtataaagtttgatgataaagggttagtccctgttgttgttcaagaggtagttagtaaagatgtactgatgttagcatatatgaataaagatgctataaagaaaaccttaaaagataaagtagcttgctattttagtagaagtagacaaaaactttgggttaaaggtgagacatctggtaatactcaaaaagtagttaagatgtcttatgattgtgatgtagatactatactactttttgttgaacaaactggtgtagcttgtcatacaggcaattattcttgtttttacagagacttgtttgatgatagttcaaaaatggagcctgaagtacaaacaaatatattgaaagaattatatgatttaatcaatgaaagaaaaaataatccagttgaaggttcttatactaattatctttttgaaaaaggaatagataagattcttaaaaaagtaggtgaagagagtagtgaggtaattatagcatcaaaaaataccgataaaagtgaacttatttacgaaattagcgatttagtgtatcatacattggttttaatgatagaaaaaggtgttgaaattgatgaaataaaaaaagaattacttaaaagaagaaaatagaataggatagattaatggtaataagaaaatataccgcttttaataaaaagtggtatattttttattttatattttcgatttatagaataatatttaaattacttgataaaattaactatatatataatttattgataaaataattgtagtacattatttattttagaaaaaagataattatctaattatatttaaggataataatatgaaaataatttttatattaaaaaatatgaatgaaaatagtaggttttataaaaaacatatttagattttaacatctaaaaggaattttcaaacctaatatttcatttttaaataaaaaaataaaatattagttttgatttatggtttaaattgggttataataaattgtcaaattatttattaatataaaatagactataaaacaagcaaaaatcatactattatataaaagaccttaaagatagaaaattacagaaagaagccaaaatgtttttgaaaaaaatgaaattttattgcaaaaaaatcaaaatcaatttaacttaatagttataatctatttttagtgttacaaatatacaatgtatattatacaatataaaaaatacgtttatttataaatattattatatttggatttttggtttttataatttttttatatttaaacataactaaaagtaaaagattacgaaagctaagtagagtttattttattttaataaataaaaaagctatttttctatatattggcataatatatgcttatttaactatgaaattaaaattaaataggattaatgaggaggaaaagaatgggaagtaatgaactgaaaaagactcttggcgtatcagcagcattatcaactgttgttggttctgttataggagcgggcgtattttttaaaccacaagcagtctatacattaactggaggagctccaggtcttggtatattggcatggttaatagctggaatcataactataacagctggtcttacagctgcagaagtatcagttgcgataccaaaaactggtggaatgatggtatatataaaagaaatttatggagacaaattaggttttttaactggatggatgcaaattgtattattttatccagggatgatggcagcattaggtgttatatttggagaacaagcatcagcactaattggtagcccatcacttttacttccaatagcaattggaattatagtaatagttgcagggcttaatatgttaggttcaaaaactggaggagtcatacaaactgtctctacaatttgtaagttaataccacttattttaataatggttgttggatttattaaaggtggtggaaataatccaatacttacacctatggttggtgaaggattaagcctgggtagtgtactaggtcaagttttaattgctatattatttgcttttgatggatggatgaatgttggtactttagctggagaaatgaagaatcctggaaaagaccttccaaaagctataataggtggattgtcagttgttatggctgtttattttataataaatttagcgtatctttgggtattaccagctaatgaattagcaaattatgcttctcctgcatcagcagttgctgaagttatatttggttcaatgggtggaaaaataatatctgtaggtatattaatttcagtgtttggagcattaaatggatttttactaactggttcaagggtggcatatactttagctacagataagactttaccaaagtatggtatattttctaaattaaattctgctcaagttccagcaaatgcaatagcattagtatctgttattgcatctatatatgctttgtcaggtcaatttaatttattaactgacttagctgtatttgctacttggatattctatgtattaacttttataggggttatgaaacttagaaagactcatccaaatataccaagagagtataaagttccattatatcctattgttcctataatagctatagcaagtggtatatttgttgtagttaatcaattgtgttttgcagggatgaaaactactatgatatctataggaggtcttgtaataacagctataggcttaccagtgtatgcttatatgactagaggaataaaaagataaaccaagtagtttacaaatgctttataattaaaataaaagagactgtctcaaaatagagataagtctcttttttattgttaaaagggtaaagagatgttttattttataaaaaaagagtgttctatgaactaaaaagtttattttaaggtattcactttatttttagtttttgaattataaaattaaacatctaaaaaattatttgctttaagatactttattttaaagtgtttttttttcaaactaagtgatatctatataacaaatattatacataggttttatgaaaattaaatctttctgttatataaaatagaatattgtattatatagaaaatattacctgatcaatatcgtgatttataaataagattagaaaattttatttgataacaaaaattagacaatatgaatatataatgtatgtattaaaaatgtggcaaatagttgttttggtatttattatttgtttaatatttctaatttataaaaaaaaaattataaattttaaaaattataaatgacattttaactagaattaattgtaaaaaacactatataatactcaattttcaacattctatacaattatacagaaattatacagcataataatcaccgaaataacaaattttaaaaattaagcaaaactttttgtcgaagttcaacgtctatatatatgtagtgtaaatttttgggataaaatactacaaaaatataaatgtaaaaatatagtaatattggaggtcgaacgatgagaaataaaaagaaaaaaataaatagaaagaagttgtatttgcttttaagtgctattgtagtgtgtctggcttttatagtagttggtgttcgcgtcagctctttaaatatgaaggaaaatgaaattagtagaaatgcaaaactgtcaagttctactattacagatatagtatctaatacatcaatagaagttagtaaagggccaagtaaaagttctggaaaaatagcatacataactatagatgatggcccatctaaatttactgacgagatgataaaaactttaaataaatacaatgttaaagcaactttttttatgatagatgggaatatgaaggaatatccacagcaagttaaaaatataattaaaaatgggaacacagcaggttttcatagtgtatcacatgatattcacaagctttatgttactagtacatcagcaaaagaggaatttgatacaaatgatcaaactttttataagataactggtaaacattcaaaagtaataagaataccttatggaagcaaaccatatacaccacaagcctcttatcaggctttagttgatgctggatataaaatttgggactgggacttagatacagaagattggagatctaattcttctcaaattgtacaaaatgtaaaaaatcatattaagaatagaaaaggtgaagataaagaccaacttgtagttttaatgcatgagaaaaaacagagtgcagaagctttagattcagttttaaaattcttatcagatgaaggttatgaatttgcgccagtagatcaaaaccaaataccaaaaaattattggttacgtaatttagagtagttaaaatataagaatattgattgatatttttagaaattgagaataaaaatgagtgaggtgtaggtatattgaataaaaaactttatataggaatggtcggaatattgtctttgatgatggttggttgtaataaaagtttagcaaaagtaaatgatgtggaaatcacaaaagaacagtacaaaaaaacaaaagcagttttatctgctactaataattatataaatgggcagtctttagatgaattagaaaaaactttggataaaaaaggtagaaataaattagaaaatgttataatatcgtttatggtggataatgaacttttatatcaagaggctaaggataaaggactaactccaagtaaaagtgaagtagactcaaaatatcaagaactagaagataagatgaatttgaatacaagctataaggaaaaaatggacaaagcaggtgttgataaagaatatttaaaacaagaaatatctagagatttagcaatagataaaaataaaaaggcctttgaagatagaataaacataagtgataatgatatggaagcctactatacaagtcataaaaaagattttaatgtagaagaagtaagtgcttctcagatacttatatcgactttagataaaaataaaaaagaagtaagcaaagataaaaaagaagctttgaagaagaaggcagataatatattgactaaaatcaaaaatggagaaagttttgaaagtttagctaaaaaatattcggatgataaagcaactggaaaaaatggaggacagctaggatattttacaaaggatgataaaaatgctgagtttacaaaggaagtgttcaaattaaagaaaaatgaagtttcaaatgtgtttgaaactagttatggatatcatatagtcaaagttactgataaaagagaaagacaaaaaagttttaatgagtgtcagagtttaataagagaatctattttaaatgaaaagtatattgagcatataaaaaaactgaatgaagatgctaaaatagacagatagaatttctaacagctcaatcctagcctgtaatcggagggagattttacaggaatgtttaagagtttaaagagaacgaaagttgagaaatacattatcgataataaagactctttttatagaatagcatatagttatacgaagaatgaagaagatgccttagatgtggttcaagaagccatgtataaggcactatactcagtggaaaatattaaagaagtaaattatataaagacatggttttataaaattttagttagaacgagtatagattttattagaaaaaaccgtaaatataataatatgacagatattgaccttatagatgagactggagagtatgataaatatactgatttggatttaagaagagctttggaagaattacctattgaatacaaatctattataatattaagattttttgaagatttaaagattgaagaagtagcaataatattggatgaaaatgtgaatactgttaaaactaggttatatactgctttaaaaaaactaaaattaaaaattgaagagtagggataaaaagaatgacaagcaaagaaaggttaaataagttaaaagatgagtatcataaaattccaatacccaagaaattagatactataataaatcatgaaaaaatagaaaacatatatcgagagaaaaataaaaaagtaaatagattaagatttaaagttgcaatagcctttgcatgtatatttacagtattagtaaatataagtcctgtatttgcagacaatttttctaagatacctgtaattggagtaatagtagaagtaataactataaaaaattatagtttaaaaagtgaaaattatgaagctgagattgatattcctaaaatacgaggtttaaaagataaaaacttagaacaaagattaaacagtagttttatggaagatggaaaaaggctttatcatcaattccaagagagaatggagaagatacaatcatcaaagaataaaggatataaatctttaagtttgagttatagtgtaaaaaataattctaaaaaatttctatcaatagagatgacaaaaaatgagatagaggcttcatcatatgtgagtaaggcacattatactattgataaaaaaagacaaatagttttgactttgccaatgctttttaaagatgataagtatataaaagttataagtgataatataaaagaacaaatgagagaacaaatgaaaaaggatagtacaaaatcctattttatagatcaaaaaaaagacttgcctgttgaagattttaaaacaattaataagtatcaggatttttattttaataaaaatgaagaccttgtaatttgttttgatgaatatgaagtagcacctggttatatgggtgcagttgagtttgtaataccatataaagtaataaaagatttgtaaattgaatagtagtttatatatacatattttaagaaggacaatatgactacatataaaaagcttaaaaaatctatatttaaaatttctatattttcaatatgcttattagtctcattagtagatataaaccctatatttgcaggtagttcctctaatgagacttcaaatagtgatacgataaaggtgttaaatgctaagagtctcaactttaaacaaggcaattatgaagtgaatgtgagtattcctaaaataaaaggtttaaaagataaaactttagagaataaattaaacaatgagtttttgcaagatgggaaaaaaatttacagtgaatttcaaaataaaatgaaaaaggaaaataataagggtcatagatacctaaatgtaatccataatgtcaaaaataattctaaggactttttatcaatagaaatgacaaaagaagagatagaagattcctcgtctataactaagaagcattacactgttgataaaaatagaggaatactattaaatttaccaatattttttaaagatagtagatatattagagctataagtgataatataaaagagcagatgagaaatcaaattaagaaagatgatacaaaatcttattttatagaccaagataaagacttcccagtgaaagattttgaatctataaataagtatcaagatttttattttaataaaaatggaaatcttgtgattagttttgaagaatatgaagtagtacctggttatatgggagcagtagaatttgtgataccaaataaagtaataaaaagactaagatagatatatagaagatttttagatagactggtaaggagaattatatgaatatatatgaacaagcaataagattaatagaaaataatgaagatttcgcatttgctacaataacgtctcattcaggttcaacaccacgtgaaactggagcaatgatgattgtgaaaaatgattctactatatttggttcagtaggaggaggtagtgtagaagcagaatgtataaaacatgcaattaatgttataaaaaatagagaatcaatgttgtataaatttactctaaacaaatctgatgtggcaaaactaggaatgatatgtggaggtactggagaaatacaaatagattttatagatagtaaattaaaaagtaatatagaaaaattcaataagagactaaaggaaaatacaagtaaagcatatatatttggtgcaggtcatatttcaagagatgttgctgtgatactatctcttttagaatttagaacagtagtaatagatgatagagaagaatttgctaattatgaaaggttcccagaatcagaagtagtagttttagattcttttgaaaatataccagattttccaactgacgaaaatagctatataattattttaacaagaggtcatctatatgattcaagtgctttagaatgggctcttaaaagagaaactggttatataggtatgattggaagtagaacaaaaattggattgacgtacgaaaaactcatgaaaaaaggttttaagaaggaagaattatcaaaagtacatgcaccaataggcataaaattgaatgctcaaacaccagctgaaatagctgtatgtatagctgctgaacttataaattgtagagctaataaggaaaaataaactaatgaacacagggagtaaagatattgatactttaaatgttaattttagagggattgaaataaaagcagttttagtatataaaaatagaaaaaatatttctataaaaatagatccatttggcaaaataattgtaatgagtcctcctaaaatatccaaaaaaataataaaagatataattattgaaaaaggagactggatacttaaaaagtcagaaaaatataaaggaagagaagaagtatacaaacaaagaatgtttataactggcgaaaaatttctttatttaggtgaagagtaccatctagttataaaagaactgttgaaagattctgtcaaaaaaagtaactgtagaataactattaacgaatatcaaatagttgttcagacaaatgatacaagtacagattttattaaaaaatctttaaaatcttggtataagatggaaagtgaaagaacagtattagagagaatagattttcttaaattaaattgtgaaataatgaagcaattagttccagcaagtgttaaggtaaaagaacaaaataagagatggggaagttgtacagctcaaaaaaatatttatataaactcaaaaatatctatggcaagattagatgtaattgattatgtaataatacatgagtttagccatttagtacatatgaatcactctaaaaaattctatgatttagtaaaatccattatgcccgattataaagataaagaaaattggctaaaaataaatggatataaaataataatctgaaaacgattattccaaaatacaggcgtaaagtataaaagaagtattattgtgaaaaaaataaataatctgaaaattttaaaaaaagtcattgacattgtaaatgatagggaatataatctatattaacaacaaaacagaattaaaatataaaattaaaaaattaaaagcaatgacagagacaacaatactaatagtgttatccacagagaaccaatgttgctgagaattggtgttaacagtagtataatgatcactctggagcttttgtactgaatatttttagtaagtacaaacgtatgtcaacgttacatgactaaggttaaggtaattaattacccgacctgaaaaaagaggggtagatgtattttttatatctacaaataaggtggtaccgcggaatataactttcgtccttataagtaatatttatattgcttataaagatgaaagtttttttattttaagcgatataaataaatttaatccatataaaattaataaaaaaataataaaaataaggagggatttttatggaaaatactgtatatgctaaattaaaccaaggaatagattcttttttaagagtggctatgactctaagaagaagagaggttgatatacaatcaataagtatgactgtagataatatgaataattcaggtataaaattaatagtaaatgaagaaaagacatctttagattctgtcttaaaccatatgaaaaaactacatgatataagagagataactgttgaaagaatgagacattaattaaatatattttataaagctaaagataaatattaaataagaaaaatcttagattaaaatataagtgtcattgaatttatcagtttatcacagttaataaatttattagtttgttgtagctaataaaaactgaaaattctaaaattataattgtaagattatataaatttagaatttaaatctgttgaataatattaaaacaatgataatgagtatgaatttctaataaaaataaatatcataaaaataagaaaaagtattgggaggaaatgaaaatggcaagaatgtattatgaaaaagatgtggatttagaggttttaaaaaataaaaaggttgcagttttaggttatggaagtcaaggacatgcacatgcacaaaatcttagagataacggtgtacatgtagtgataggtctttatgacggaagtaaatcagcacaaaaagcaaaagaagatggatttgaagttaagagtgtagcagaagctacaaaagaaagtgatttgacaatgatgttaatgcctgatgaaaaacaaaagaaagtttatgaagagagtgtaaaggataacttaaaagaaggtcagacattagcttttgctcatggattcaatatacattataatcaagtacaaccaccagaatttgttgatgttgtaatggtagctcctaaaggacctggtcacttagttagaaatgtatttacaaagggaagtggagttcctgcactatttgcagtatatcaagactacactaaaaaagctacagagacagttttagcatatgcaaaagggataggagcaacaagagcaggtgttttagaaactacttttaaagaagaaacagaaacagatttatttggagaacaatcagtactttgtggtggaataagtgaacttataaaattgggatataaaacgcttgtagatgcaggttatcaaaaagaagtagcatactttgaatgtttacatgaaatgaaactaatagtcgaccttatatatgaaggtggatttgaaagaatgagatatagtataagtgacacagcagaatatggagattatgtatctggtaaaagggtaataactgatgctgcaaaacaaggtatgcaaaatgttttagaggatatacaaaatggaaaatttgcaaaagcgtggattaaagaaaatgaagaaggacgtgaaaacttcctaaaaactagagaagaagaatataatacagaaattgccgaagttggtagaaatctaagaagtatgatgtcattcttaaaataaatatatattaaatggattagtttgagggaaagagtggtgtatagtagtgcgtatgaatggagcaaaggtaattttagaatgtttaaagaaagagggaattgacacaatatttggatatcctggtggagccgtgatacctctttatgatgctctatacgattattcagatgattttaaacatataaggacatcccatgaacaaggtttagttcatgctgcagatgggtacgcaagaagtactaatacagtaggagtttgttttacaacatctggtccaggagcaacaaatgccataactggaatagcaacagcttttatggattcttcacctatggttgtaatttcagggcaggtgccaactagtttattaggaaaagattcttttcaagaaattgacataactggagcaacattatctatgacaaaacataattatttagttagaaacactaaagaattagttcctacaataaaagaagcttttagagttgcaaattcaggtagaaaaggacctgtacttgtagatgttccaaaagatttatttttagcagaaatggattttagtggtgaggactatgatttatgtcaaatagatgattatatggattataagagtgattttgatctagatgatgaaactaatattaagcttttaaatgaagcaatagatatcataaaagaatctaaaaagcctgtaatatatgcaggtggaggtgttaaatcttcagacagtgaggaaattcttgaaaaatttgcaactaagatagatacacccgtactaaatacacttatggggcttggaaatatagatagaaagaatgaactatctcttggaatggttggaatgcatggaagtagagaaagtaatttagcactttctaattcagatttagtaatagcgataggtgcgagatttagtgatagagtgataagtaaaagttctgaatttgctaaaaatgcaaaaataatacacatagacatagacccatctgaaataagtaaaaatatagaatctaatgtatctttggttggagatgtaaagctagtccttagtttattaattgaaagggttgaaagtaagaataatagcaattggaaagaagagataaagacatttagaaagagtgagggtgtacaaacatatgaatttcatccacaaaatatacttaaaaaaataaatgaaaaatatgaaacattaaagaaacccactgtggtagtaactgatgtcggtcaacatcaaatgtggtctgctaaatactggaattttaaaggtaataaaagttttataacatcagcagggttaggaactatgggatttggtttaggtgcagctattggaactaaagctggtaatgtagataaaaatgtggttttagtaactggtgatggaagttttagaatgaactgtaatgaactagctacagttgcaaattataatgtacctatgcttattttactactcaataatagaacattaggaatggtaagacaatggcagaagttattttccaatcaaagatactctcaaactgatattaatgaaaatgtggattatgttaaactcgtaaatgcatataatattgatggatataaggtatccaatatggaagaattaggaaaggttctagatgtgatagattttaataaacctgtatttttacaatgtgatatagataaggattatgatgtttatcctattgtagcacctaatgatgcattggaaaatttgatatgtaactaaaacttatactgaatattgataaaattttttattaaatttttattggtattcagtttttgtttagagatagattggcattttttatttttgcaaataaatcaatgaatatataattaagaacttattaaattttaattatacaatttagaatagtattacaacttaagtaaatattaagttttattcgttagatttattattaataccttatattagttatggttgttatatactctaaagccttgaaattacaagcgtatagctgactatataaatttgataattttagcttttaaaatagataaattagattttgccacccatttgccaccgtattatatttttgggtggcaaactctaatttgtaattttttcaaatatatctacagtttcatttttcattttatcagttacatgtgaataggtatccattgtagttgataattggctatgacccaaacggttttgtatgtctttaatgttagcaccattttctaataatagagtagcatgtgcatgtcttaaagaatgaaaatggaagtcattgtttaaagctactcgaatttgtcttactatagtgtctaaagtgtgagtattcacttgttgaccattttctttggtacatacccaatcactatcaaagtaaaattctccgtattttaatttcattttcttttgatataatttatgttcttttaatgcctttattaaagtgtcacctgtaaatatagttctgcaagagctttctgtttttggttgccctaattcaaacattccatttggttttttaatcaaagtatgctttactgtgatagttttattatcaaggtctatattatcccattttagtgcaataatttcacctcttcgcataccagtatgaaatccaattagtaaaactatacgttgaaatgaatcttgaggaaatatatttagtatttgattaaattcttctaatgtaatagttttaactttattagtttctgttttagatttagtttttggtatgcttacatattgcatagggttttctcgtatgtgtttgtaaggatggactgctgattttaatgacctatgtaatatggcttttaatacttgtaatgtattttgagaataatcctctttgtactttttatttatgaagttttgtagtattgcaggagttaaagcttttactttgtaagctcctagttttggctttatatgtttttctatgtttattcggtagctttcttgagtgttgtatttacagttgagtaaaacatattctttgtaccaaaagtctaggtagtctgataagctgatgttactttcttcaaagactatgccagagttttcatattcatttagtgcttctcttagtgctttttctgcttctttttttgtattgccaccaactctttctactttttttctttttccttctactatgcctaggtcaaagtagtaataccatttgttgcttctttttcttactccacctttcataatagtatccctcccttttagaatgtatgtttgtttggtgtttatataaaaaatgtctcctatatttacaagaagacattaattatattcgtcaaataatatttctaatttaacttttatacattcatcacaattattttctttgttaacaaatttaataatgcaattatactttaatcctctatttattatacttgttaattctccactataatatctaggaatgtaacctatatgattctcttttttatcaaataccttgattgcatgaggatcaaatttattttctggttctaactctagaactagagcttcatttgattctaattctattgaattatcacattcatgtccttcacacccagcataatgtcttactcctgcaatataaaaatatctaattatatttttatcaatgtccaaaggaattggatctacaaattctagtgtatctataggtaatcttgcaccacttctttttaaaagttcatatgtatcatactcagacatatcatacttatccaaaattttattgatgtcctttctttttttatcaggtaatctacttgcaaatgggctaaataaatcttcactataatatgttttactaatatcatcaaatgatattaaagcattaaaacctgctttaatagcttcatcaatttcatattcataagaaaattcatacaatccatttttagctaactttccaattataaattgtcttctactttttggatctttccaaataacatataaaaaatcttttccatttttaattgacattttatccctctttcacaaattatatatattttttattcttaacactttttcttttagatatatttttagcaatttttttaactttgggcttataatattttctgaatagttatctattaatgtatttatgtttacttcattcataagatttattatcttttctacaaaatctatagtttgttcataataatttgaatttaaatattttagcacttctaagtgtgttggttcttttttattttttccatctatccttattcttgatcttgaacgtgtatttataagagcttcaaatctttgatgatcagtgaagaaagaatctatgttctcaatattaacataacaacataatgatgatccgttatcatatagaggactaagagtaattttattttgactttctagtagagcccaattattttgatgcctatctctatttccaatcaagtaatcaaaaattaacatttttagaaaatcattttttatgttatattcttctatagatttaaaaatcattttcaatgaatagtattcattatttttataatcatataacttatctgtattataacaaggataatatttgtttattaaccacacgccttcaatcaatttctcatcatttttattgattaaataactcattgaaccaattcttttattatatgtacctatctcaacattagcacaaggaatctttaacaaactagctatttcacaggctaatttttctgcccaatattctccagtttcttttgttttagggaatttaaacaagcctatatctttagttttttcattaattagccagattttctcgcttcttccactaccataagaaaaaccatcatactctttccattcatcaaaatttttaatcacgaaaataatcctctcaaacaagtattttatattcttattgtatcatttgattctaaatttgcaagaattttattatccataataagcttaacttaaaataaaaattttttctagattttatttattccacttttaacttcaagctttattacatatggaatatgtgtttactcatcaaaattactactgtgtataatggttttactttataaatacttaattttagttttctatatttatttggtaatttttttgagtgttgttaagtaagaaatattttttgtaccaaaaggtaagctgatattgctttattcagatactatgcctaggtcaaagtagtaataccatttgttgcttctttttcttactccacctttcataatagtatctctcccttttagaatgtatgtatgtttggtgtttatataaaagagcagattaactgctctttatatacttttgttatgtacaatattatcttaattttgtttatctggtttttacttaattattttcttaatattcttacaattttttagcttttatgtgtagtttattataataatattgaaatatatatttattaagtaaaaaatctataaaagtagaataaatgagtttaaaaaatatcctcatatatgtagaaatttggcaaattagttaatactaaaaatctattatttcctaagtccaacatgcttttcttttttgatagaaattctaatctttttagtaagaagttgatgctaacttgtaattcttcagctatttcgtatacacttgtagcgtgtgaattaataacatgtattatttcttcttctgttataagaaattcacatgcccattttagtgctttgttttcagttttgtctatcaagattttatttttgtaactgttttttgaagatacatagtttccaacactggtaaaatgatgtcctaattcttctgctaagatttctattagtttagcattgttttgttttaatgaattaagtaatgatataatttttagtccttgtctgtttatatacaatccttttatgtcatctgctattttgtcagtgtagtaaatttctatctcttcattatttgctaagtctaaaagtgcgtctagtttgttcattgaaatccccctataaaaagaatgtatgtgttacttttttatatataaagagcaggagtgaactgctctaaatattcattttttatatctatcaactaaaaactctatgtagctattaatatgttcttgcgcttctttaggtaaactttcataagatttaattattttggatatttcatcagtagttatgtaattttcaattgaggttttaccaagtagataatcaactgacacattaaaaaattctgaaattcttaacaagtcttctttaacaggttctcttttgctagtttctaacatagcaattttgcttagtgaacaattaagtaattttgataattctgcttgagttaattcttttttctttcttaattcttttaaccttattggaaaagttgaatttaagcattttgttaatttatttgaatcatctatgttaatttttccaattaagtaatctgtagatactccaaaatagtctgagcaatctttaataaatgattcttttggttctcttaacccattttcaattctggataaagtggatttatttatatttaagtctgtgcttaatttatctaaagaaattcctttttcagttctcaatttttttaatattaacatagattcaatccttattttttatatttattcattaaaaattcaatataatcgttgagttgttcttgagcttcctctggtaaatctttgtgaggattaactctgtgtgcggctacagtatcgatgtgatttctaacaagagttctacccaaaagataatcaattgatacatcaaaaaaatctgcccaattttctagaatatttatttctggttttcttttattattttcatattgcgatattgttgatttattaaaacttgtaaagtaaactttattgaattttgaaactagttcatcttgagtaagttttttctcttctcgtaattgtttgaaacgttctccaaaagttgccacaaacaacacctcccaataattaaatgatactataagtttacagaaacgtaaacttatgtttagaaaaaaataaaaaagttaacaaaaaaataaacttatgtattgacaagttttgtttgtgtgaatataataaaagtatgaagttcacaaaaataaaacattggaaggtgaagaacatgaagaaaagaagtttaaaagctggtcgaatagaagcaggatatacccaagaagaactagcatataagataggaatagcaaaatcaacatataatctaaaagaaaatggaaaaagaaattttacggaaaaagaaatgataatgattagctatattttaaataaaacaatggatgaactttttttagaaaaaaggttaacataaattaaaatttattgttcacaaaaacaatcataaggaggaaagaaattatgaataatttacaaatattcaaaaataagacttttggagaaataagagtaatcgaactaaatggagaattttggtttgttggaaaagatattgcagaacaattaggatataaagatacatctgatgctttgaaaagacatgttgatgatgaagataaaggagtaggtgaaataccgactcctggtggtaatcaaaatatgaaagtaattaatgaaagtggtctttattctttaatattaagttctaagttgccaagtgcaaaattatttaaacgttgggtaactaatgagatattaccaagtatacgtagtactgggacatataatatgatagatttgcaaactaaactaccaactacatataaagaagcgttacaacatcttatagagcaagtagaagtaaatgagcagttacaactagaaagtaaaatgaaagaccaagtaataaaagaactaaaaccaaaggcagattatacagatatgatattaaaaaataaaggacttgtcacaataactcaaatagcaaaagactatggaatgagtggaaaagaaatgaataaaatacttcatgaaagagggattcaatataaacaaagtggacaatggcttttatataaacaacatcaagggaagggatacactcattcagaaacaatagacataactagaagtaatggaatgcctgatgtaaaaatgacaactaagtggactcaaaagggaagattgtttttatatgatttattgaaaacaaataacatattaccagatatagaaaaaggatatagttatcaaacttcaatattaggttagtactttgaaaactaaatacagaatattttagaaaggagagattgaattggaaaataagaaaatagaagaaatagagaaaagaataaccatgcttgaaaatcaattgcaagcacagttatttagtcagataacagctcaatcaaatagtgattttatagattatatgtaccaatgtatagttttgtatttacatgagatgaataaaagtgaaaaaagaaaaattagtgaaattactaaagaaagaatcagaaaataagaatgataattacaatataaaacctattcttctagcaggttttgaagggtcagttttctttactgaagttatcataaagtttatctgtgatgtgtgttgaagaatttcagaataaactccatttactatgccgtagtagtgaattagacaagggttatgataacctacttcttcaacaatcattaagacatcttttccaaagttagtcaattttagtgcaatttcatgttcatcatcaagttctttttcaaattcctctatagatttaagaataattttatattgaaattcagcatagtaaaaatactctgtgttagaagtatcagagactgtctttcttatactttcttgtaattctttagatatattgtttgaaaactgcataatacaccatccttttgaaaattttggaatttattccatgtttatattataccatgtagaactgaggtgaatacaatgttaataggcgacaatataaagcaaatgctaagaaaaagagatataaaaccttataaattggcaaaagaattgaatatagatgtaagtggtttatataaattactgagaaataaaagttctaatccaactatagatactctaataaaattagctgattatttagatattacattagacgaattagttggaagataaataattaaaaagaggggagagaattttcacatggatatttctgagagtatagcaaaacaatttagtgatagtttaaaaagtttaatagaaatagagataagtaaacaagagacagatagagttaagagtcaaactattgaacaaaaggtaaaggtactggagcctaaagatatagttgttttaataaaaagaggttatccaaattatctaataacagtagaagaagcaaggggaattttaaagttagatacagcttttatgcgtaggttagtaagcacaggtttgataaaatcactagttagaggtgatggtagaaaaatttcaagatatgaagttgatgattttattgaaagaaatcaaggtaaaaatttggatgaacttttaaaagcagtagagtggggggatgaaattgctgagtcttgatactaataataagaatgtagtaactcttaaaaaagatggaaaagttatagcagatatagtatttaaagatattaaaactggtaagaaaatatcggttggaatattaaataaaaaagtgttggtaaaataaccaacacacaaaaaaataaaaaataaaatataacacaagtaaagtataacacaaaaaggagatatttaaaatggttgaagttaatgtaaatgtaaaagttaaagtagaagcaccagaatttacaaatgcactattagtagtggcgaatgctttaggaggtcttaatctaggaaaagcaatgcagatagaacctataaatataacagatatgaaagaagagaagaaagttgaagttaaaaaagctgaaaagattaaaaaggtagaagtaaaagaagacgttaaagaagaaatagcagaagcaaaggaagaaatagaaaagaataatgaaaatacaactagtgaagttaaatacacaaaagaagaggtaagaactaaggcagcacaagtaagtaaggcaggtaagaaggataagcttaaggagttatttggtgaatttggagctagtaagttaagtgaagtaaaagaagaagattattcagcttttatgaacaaattagaaagtttatagggggtacataaatgccattacaacatgcaagacttagtgcgagtggagcccatagatggcttcactgcactcctagtataaaattagaagaaaactatccaccattaactagtatatatgcagaagaaggaacagttgcacatgaattagcagaagttaaattaatgctagagtatgaaaaaataagtaaaaaggcatataatgcaagaattaaaaagatacagaaaagtgagtattataactctgaaatggaggactatatacaatcttatgttgagaatgtagttgaattagtaaatgatagtaaagctatatgtgatgatgtaatagtgatgttagaagaaagactcgattttagtgagtgggttccagaaggatttggaacaggagacgttgttgtaatatctgatggtatacttcaagttatagacctaaagtatggaaaaggtttagaagtttcagctatagagaatcctcaacttagactatatggtttaggggcatataatcagtttgaaatgctatacgatattgatttaattaaaacaacaataattcaacctagacttgataacatatcaagtgaagaaatagaagttactaaattacttacatgggcagataatgttaagaagaaggctcaaatggcttttaatggtgaaggagagtttgtaagtggcagtcattgtggattttgtagagctaaaaatgattgcagaaaaagagctgaggataaccttaaactagctagaaaatatgattttgctgacacatttgctcttaataaatatgagatagcagatattttaggttttgctaagaatatacaagattggttaaaggatgttcaaagttatgcactagaacaagctgaaaagcatggtgttaaatatccaggatataagcttgtagaaggcagaagtaatagaaagtatgtagatgagcaagaagttgctaaggttttattaaattcagattatgatgaagaaaaaatttataagccaaggaccttaaaaggaattagtgatatggagaaagctataggtaaaaagagttttgctaaactactaagtgatttaattataaaaccagttggaaaagctactttagtagtagaaagtgataaaaggtcagaaattaatagtatagattcagcgaaaaaagattttgaaatataaatgggggatattacatgccattagatgcaggtataaaagataaattagatgaaagcataagtataattttagatttaaaggatagaaaaaagagtatcgaaaaagatttagattatgaaaaagataatttactagatatgttaaagagactaaatattacagaatataactcaactgaagaaaatgcaaaagttatagtgatggattttaaaagagaaagtttaataaaggataaagtgatgtcaactttcctcgaagtaaatgacaatcatcttgatagagtgtatataccagaacatataaaagttagtccagtatgctttgtatcagtaagagcaaaggataattaaaaatatttaattcctagtagctataaaaagatttaaaaggggatataattttatgagtaatcaagaaataactaaactagttgaaaataatttgaatcttgtacattttagtataaatagattttttaagtcttatgtagagcaacatccatacttatatgaagagttttatcaagaaggatgtattgggttatataaagcagcattaaattatgatagtaacagaggcaagttttctacagtggctgtttcttacataagaatagaaatgtttaaagctttgcgttatggcgaaaaacattatagaaactctatagaaggtttagatgtaagtgtatttgaagatagtaaaagaccattaaaagatatacatggattttatgaaattcaatttaactatgatgttgattatataagaaaaattgcaagaaagtcatatttaaaagatattgataaaatagtagattggattttacaagataaaaagatatctgatataggagagttattaaatgtttcttcaacagttatttgtggaagaattaaattgtttagtaagcaagttagagatttagataaatttggagaaataacttcaaatataaaatcaatataccaaatataaaaatattaggaggaagaaaattatgagtaattcagtacaatcaacaaaggtagtaacaggaaaggtaagattaagttattgcaatatctttaaaagcagagcaatggtagaaggtgcagagcccaagtattcagtttgtattttaataccaaaatcagataaggtgactttaggaagaataaagaaggctattgatgcagctaaagaacaaggtaaaacttctaaatggggtggaaaattaccaggtaatttaaaaacacctcttcgtgatggagatgcagaaagagctgatgaagcagaggaatatgtaggaatgtattttttaaatgcaaatagtacacaaaagccaggaatagttgataaagacttaaatgaaatattagataatacagaggtatatagtggttgttatggaagagttagtataaactttttcccatataatagtgcaggaaataaaggaataggttgtggcttacaaaatgttcaaaagttagcagatggagaagtacttggaggagctagagctagtgcagaagcagatttctcagatgactttgaatatgaagatgaagaagaggacttcttaagttaatgaggaccttatcaattgatatagaaacatatagtgatttagatataaaaaaagttggagtctacagatatgtagactctgctaattttgagatactgttatttgcctatgcttttgataatgaagaggtaaaagttattgatttagtaaatgatgaagagttaccaaaagaagtaatagaagctttaaatgataataaagttataaaatcagcatttaatgctaattttgaaagaacagcaataagtaaatttttaaatattaatttaaaaccaaatgagtggtcatgtacaatgataaaggcgttaacactaggacttccaggaagtttagatagtgtgtctaaggctttaaagtttaatgaagataaacagaaaatgaaagaaggtaaagcattaatacaatatttctgtaaaccttgtaaggctacaaaagttaacaagggaagaactagaaatttaccaatacatgatatggaaaaatggaataaatttaaagaatattgtaaacaagatgttgtagttgaaagagaaataagaaacaaacttagtaagtataagactaccgaaagagaaattaaattatggtatttagaccagagaattaatgatactggtattaaagttgatacagagttaatagagaatgcaatagaatgtgataaaagatatactgaaaaacttacaaaagaagcaattaaaataactggtctaaataatccaaatagtccagctcaattaaaaaaatggttaagtgataaagttggctttgagattacaagcctaacaaaagaaagtattccagaaatattaaaacaagttgatgatgaaaatgtagttagaattttagaacttagaaaattaatgtccaaaacttctataaagaaatatgaggctatgaaattagctaaaggtaatgacaatagagtaagaggtctactacagttttatggggctaataggactggtagatgggcaggaagattagtacaagtacagaatttaccacaaaatcatatagaggatttagacctagctagaaacctattaaaagaaggagattttgatttaatagagcttttatatgatagtgtaccagatgtcttaagtcaattgataaggacagcttttataccaagtgaaggtcatagatttatagtatcagattttagtgcaatagaagctagggttatagcttggttcgctggtgagaagtggagattagatgtatttaattctcacgggaaaatatatgaagctagtgctagtcatatgtttaaagttccaatagaaagtattaaaaaaggtgacccacttagacaaaaaggtaagatttcagagctagctcttggatatgggggaagcataggagctttaacatcaatgggggctataaaaatgggtcttgatgaagaggagcttcaacctcttgtaacaacatggagaaatgctaatccaaatataactaaattttggtgggatgtagataaggcagctaaaaaagccataaaagataggactatagtaaaactccaacatgggattaaatttatttataatccaggagttttatttatagaactaccaagtggtagaagattatcatatctaagacctaagatagagcctcatactacatttagtggggataagataacatatgaaggtatggaacagacaagtaaacaatggaaaagaatagatacttatggacctaagttagttgagaatattgttcaagctacagctagagattgcttaagagaggctatgtttaatgtgacagatgcaggttatagcattgtaatgcatgtacatgatgagcttgtaattgatgtagataaaaaaggaggttctttagaagaagttaacagtattatgggaaaagaaatatcttgggctaaaggtcttcctcttaaagcagatggatatgaatgtgattattataagaaagactaggtgattgatttatggatataaaggccagtgaaattgaacacataaatgtaagacatgatggccaactcatgctggccataggaaaaaataaattagaaacacattggaaaaataaaagtattttatggtccgaacttgtaaatagattaagtaaaacattaagaactcaagaaacatatacagaatataggaagatgtcaaagactgaaaaagatagagttaaagatgttggtggatttgtaggtggaagcttaaaaaatggaagacgaaaagcagagaatattgcaaatagaagtattataactttagatatagattatgcgaataaagatatatgggaggatataacattattaaatgattatgcttgtcttatgtattctacgcactcacatactgagaataatcccagatatagacttgtaatacctttaactagaccagtactaccagaagaatatcaagcaatttccaggatgatagcagatactataggaatagatatgtttgatgatactacatatcaacctcatagacttatgtattttccaagtacttcaattgatggagactatatatttaaatttcaagatggagagtttttaaacccaaatgaaatactagatttatatttagactggacagatgtaagctattggccagaaagttcgagggagaggcaaaagtttaatacacaattaaaaaaacaacaagaccctattgaaaaggctggaattataggtgcattttgcaggtcctatagtataaaagaaactatagaaaatttcttaaatgaagtatatattcctggtattgatgaaaccaggtatacatattcagaaggtagtacaagtggtggagtagttatttatgatgacaagttttcatatagtcatcatggtacagacccagcaagcggaattttatgcaatgcttttgatttagttaggatacataaatttggtgaacttgatgaagatgctaaacccgaaacgcctgtaaatagattaccttcatttactcgaatgagcgaatttgcaagcagtgacactaaagtacgaaagactataggaagagaaaaccttgataaagctaaggatgattttggtgatatagattttgaagatgatgaatggttaactaggttagattatgacaataagggaagttataagaaaacaacaaacaatatcttaatgtttatagaaaatgacccatatttgaaaggaaaaatagcttataatgaattttcaaatagagctgtcgttttaggtaagttaccttggagaaaagatgataaattaaatgattggaatgatagtgatgattctgggcttagacatcatatagaaacaatttacaatatctcatcaccatcaaaagtaaatgatgctctaataattgcttttgaaaataatacttttcatcctataaaagattatttaaattctttaaagtgggatggcattaagagagtggatacacttttaattgactatttaggtgcagaagataaccactatacaaggactataataagaaaagttttagtagcagcagtagcaagagtatttaatccaggaataaagtttgataatatgatggttttatctggtcctcaaggaatgggaaaaagtacttttattaaaaaacttggtggagactggtattctgatagtttaactactgtacaaggtaaagaagcgtatgaacaattacaaggagtatggttgctggaaatgggtgaaatgatggctactaaaaaagcagatattgaggcagttaagcattttctaagcaaatcagaggatatatatagggtcgcatatgggaagagaacatcaaggtttttacgtcaatgtgtagttataggaacaactaatgataaagaatttttaagagataagaccgggaatagaaggttttggccaatagatacaggagtaaagaaggttaacaagagtatatttaatggtcaacttgataatgaaagaaatcaaatttgggcagaagcagtagaattatgtaaagccaatgaacagctatatctatcagatgaggagaaaaaagaagctgaaagacaacaaagaactcactcagaagaaaatgctaaatctggaattatcgaagagtatctaaataaacctattactgagaattggtatgatttaagtatttcagaaaagagagaatatattcatggttcagattttggtgatttaaaagaaggaacaatattaagagaaaaaacgtgtgttatggagatatgggttgagctatttaatggagaacctaaacaactcacgcctatcttatcaagagaaattaatgatatattaaaaggattagatgattggatatcatataatggaaatttaaggtttgggaaaatatatggtaggcagagagcttatgtacgtaaaagttagtgtcaacagaattaaaaacagagtaaatttgaaaattttaaaagtgtcaacaatgtcaacaaaaaaaatggctttgttgacgcttatgttgacacctaagatgcagtaattacaatgtttgaggtattaatgtcaacaatgtcaacaaaaattaagtataaagtagtataagtaatattaggcatatacgtatatacatatgtatgcctaatatgtatatatacatatatatagaaaatctgttgacattgttgacacttaaattttaaggaagtgatattttgttagaatcaaaaatagaaaaaagacttaaaaaagagattgagttgttaggtggaaaggctatgaagtttatttcaccaggtgaggcaggtgtgccagataggattgtcttattaccagaaggacatgttatatttgtagaacttaaagcaccaggtaaaaaactaaggaagcttcaacaatataaaatgcgagaattaagagaattaggatttaaagttaagtgtgtaagcacattaaaagagatagatgattttatcaaggaggttaagggatggaatttaaaccacatccataccaagaatacacaattagaaaaactatagataataataatataggtttactattagatatgggattaggtaaaacagtctgtactctaacagctataagtgaattaatgtatgattactttgatatatcaaaagttttagttatagcacctttaagagttgcaagagatacctggagtagtgaagtaaaaaaatgggaacatctaaagcatctaaaagtatctaaagttcttggtagtaaattagatagagtgagagctttaagtacagactcagatatttatataataaatagagaaatggtaccctggatagtggatttttataaaagaaaatggccatttgatatggttgtgatagatgaacttagttcttttaaatcaaataaagcacaacgatttaaaagtttaaagaaagtattgcctttaactaaaagagtagttgggcttactggtacaccaacaccaaatagtttaatagacttatgggcacagatgtacttacttgatagaggtgaaagactaggtaaaactattacaggatataaagaacgatactttgagccaggacaaaaaaattatcaaacaggagctatatataattggcaacctaaaaatggagcagaaaatgcaatacataataaaataaaagatatttgtataagcttaaaagcagaagattatttgaatatgcctagaaaaatagataataaaattgaaatacaccttgatagtaaaatacttaaatattacaaagaattagaaaaagagaagatattagaattagatagagatataataacagcttcatcagcagctgtagcagcaaataaacttttacaattagctaatggagcaatttatgataatgataaaaatgtaaaggaactccatagagaaaaattagaagctttaaaagaaattatagatgtttcaaatggtaagcctattatagttttttataactataaacatgattataatcgtttaatgaaagagtttaagagtttgaaaccaagaacaatagaaaactcaaaagatatatatgattggaataatggaagaatacaattattactttgtcatccagcaagtacaggacatggacttaatttacaatcaggtggaagtataattgtttggtttggattaacttggagcttagaactgtatcaacaagctaatgcaaggctttatagacagggtcaaagggaaactgttattatccatcatctaatctgtaaaggtacaatagatgaacaagtaatggaagctatagataataaggataaagggcaaagtgcattacttgaagcagtaaaagcaaaattaaaagaatatagggagtgaaggtatgaaagtaaaaagaaaagatggaacttataagcccaggtaaaatagtaagatgtgcttggtgtggtagaagattttataagttggataaatctaaagttgagtattgcagtagaagttgttcgaagagagcaagaaggagtgatttaagtggataaagaaagtataaaagaaattgtaagagagttaagaaaagaagaaagagaagataggaaaaaaggcgttttatataatactagattattgatgaagcattataatgattttaagagacatatagactcagcggtaagtgaagctaaagatgtagattacttagaggatgatttaggtaagcttgataatgaagagttgtatattttaagtataaagaaaagtaaagcaagaactattattatgatagcacatatagattcagcaatgaaaactttgaaattaagacaagagcgtttacattcttatgaaaagtatagagctttagagctttactattgtgatgaaaaaacatatgaagaaatagcagagatattaaattgtggagtagttacatcaagacgttggattaatgaaatggtaaaagaacttggagtgtatttatttggtatagatggcttgaaattaactgtttgataaatacatgataaaaagatgatattttaatgatatttaacccctgttataatggtagtatgaaacaagtgtataatatattcccccttgaaaaaggctaagttaccccaacttagtcttttttattttgtaaataaggagaatgataaatgagtaattcatgacttagagtgatttctaggtctttttttatacaattttaatctctcatattgaagggtcgaaaataagggtgttcaaattgaatattctttattaataactaatttaggaggtagtagtatgttgaaaattttacaagagaaaaatgtaaggatgatatggtcaaaaaatggagaagaagtttggtttaatgcaaatgacgtaggagaggaactaggcatagtaaatattcgtgatacattaagaaatatagatagagaatataaaaagaaatttaatgagtctactgtcggagattcctacactagaaactttaaagataaattgcctaactttggtactacttttgttacagaagaagctgtgtacaatatgtcatttagaagtaataaagcagaagcaaaactatttacgaagtgggttacaaaagcacttaaacaaattagaatacatggttactatattgccacagaaaaagatcaagaatggctggatataagaacagaaggtaaaaggtcagaaaagattttacagatgaaatacaagagtttttttattaatacaagtacttgaaagagttatatctatgaaattacctaggttgatagataaaggtatgaattataaagaggtatataaaaagattaaagaattaatcgaaatgatttaaatgactgtattaatagagggtctttttttttatgtaatgaattaaaaatgaaatatatttgtacattatagacaggaataaggtaaaagtattatttagacttattttgtggttgtcgaatgattattgaaggatattgactgattatatagaattatatcattataaatatttgtgaaaggaataatggtataatgagtaattttaaaaaaagatatattgatgtttatagaatagatattataaataaaattaatgggagtgtctattcagatgaagaaattttaaaagaggtaataaagaccttctttaaggataaagaatattgtaaagaaaacaaaaatggaattaatattactaaagataaaaagttttggattacagaagtaaaatgtagcgaggatgatttaataatcaaggtgaaacttgaatatactaaatacaatcagaatacaaatattataaatgctcatactaaagaagtagagggtaataaaaaaatggatcaaggagatagcaataagcagcacctatttattaaatttatgaaggaaaataatatagcagtagtattatttgaaagagtttttgtgggggttcccatgattgaactaagtaaaaacttacatctatattatgaggatatgattgaaaataataaatttgataataatatgtcaaaaacatcaattaatattacacaaatagcaagtaaagattttatagaacaaatattagatttagatggtgtttcaaaaataactttaaatgttgatagagagaagtttggaactgatgaagataatttgttttctaatttaaataattcaagacgacataacgatttgatatataagcccacatttagaactagatatttacctagtgaagttaaaagatgttgcgaaaaatatattaaaggagaggaatttagaaataaaaaaataaataggataataattgagggagagaaaaataagagaaaattaaagttggatactgagggtataaagttgtgtagagaaatagaggtttctcttgatatagataatcatatagatagtgaagacatttttgagaagatgaataatttgatagatgatttaattgagaataattcagttttttttaatttaatgtatcaagaagttgctatgagtgaagcatagattgctaaggaggtgttaaaatgtataaaaaggtattaaatatcttactcaattattacaaggctataaattctaaagaagtagtagagttagttttaacaccagtattaatatgtattatttcatacatgttttttaattcgtcaattaataaagaagttgtaatttctttaaacaaagatgtactaactttgtcaggactattagtagcttttggagtttgcattattacattattgtttactacatataacaaatcaatatcagaagcaaaagatataaaaacagaaagaaaggtaaatggatttaatatatcatactttcaattcatacagttaaaagcatattatactgtaataatggagattttggttgttgtaatatgttttatcaatacaataatgcttactcgatattattctaatataattttctatgttttaatattttttacagttcatataattttatctctaactacattaataataagtatgtttcatttatcctggaaggatagaggagactagatttgaaacaatcctattaaataggattgtttttttattcccaaaacaaacaaataaagaggtggtgatgtgcaagatgtcaaagaaaaggtaaaacaagattacttaaaaggaatgaaacaaaaggaaatatcagcaaagtatgacattagtttaaatactttaaagtcatggataaaaagatacaattggtctagtgaaaaaaagaagggtgcacctataaataaaaggggtgcacccttttctaataaaaattcagttggttatggtgctccaaaagagaataaaaatgctgaaaagtttggtttcttctcaaaatacttacctgaagaaactagggaattaatacaagaaatatctataaaagataaatttgatattctttgggaacagataacaattcaatacgcagcaataataagagcacagaagataatgtatgttaaagataaagaggaaatgattaaggaattaaagaaacatgaaatcacagaaaatagtgagaagatagagtatgaatttcaatttgcatgggataggcaagcatcttttcttaatgcacagagtagagctatgagtgagttaaggagtttaattaagcagtatgatgaaatgattcataaggattggaatttggctacagaggagcagaaaacaagagttgagaagttgaaatgtgaggttgctaacctaaataaagatgatattggagatgatgagttgaaaataagtgtagattatggtgatagaaatgatagttagaataaattttaatccagatttcaaggaagctaattttactaaaaaaagatacagagcaatgaaaggttcagcagggagtggaaaatctgttaatgtagcacaagactatatactaaagttaggagataagaagtatcaaggagctaatctattagtagttagaaagtcagaagctacacataagtattcaacgtatgcagagcttacaggagctataaatcgtatttatggtaaacaagctgataagtattggaaaactactttaaatcctttagaaattaagagtaaagttactggtaactctataattttcagaggagttaatgatgcaaaacaaagagaaaaattaaaatcaattaacttctcgaaaggaaaattaacatgggtttggtgtgaagaagctacagaacttatggaaagtgacatagatatactagatgaccgtttaagaggtattttaactaatcctaacttgtattatcaaatgacatttacatttaatccagtctcagctactcattggataaaaagaaagtattttgactataaaaatgatgatatatttactcatcatagtacttatctacaaaatagattcatagatgaagcttactacagaagaatgcaaatgagaaaagagcaagacccagaagggtacaaagtatatggtcttggagaatggggagaaactggtggagcaatacttaaaaattatgttatacatgaatttcccacagaatttgaatactttgacaatatgagactgtcacaagactttggctttaatcatgcaaatgcaatacttagaattggctttaaggatggagagttatatatatgtaatgaaatatatgtacatgaaatggatacctcagaaatcataaaaattgcaaatagtagaggtttagaaaagactctatttatgtactgtgatagtgctgaaccagatagaattaagatgtggaagagtgcaggatataaagctaaaggagttaaaaaaggaccaggaagtgttaaagctcaaatagattatttgaaacaattaagaatacatgtacatcctagttgcactaataccataaaagaaatacaacaatggaaatggaaacaagacgaaagaactggattatatcttgatgaaccagttgagtttatggatgatgcaatggctgctcttagatattctatagataataagcttaaaaataatggaataagcttcttaaagtaaaggaggtgttaaatatttatataagtgaaacagatttaataaaagttcagttaaaaaaagagagcacctttaacctagtaaaagtcatagaacactacatcttaaagcataggccagaaaaatataaacaaggagaagaatactattatggtaatactgatgtaaacaataagagaagatattatctcttagatggagctaaggttgatgattttactaaagttaataataaagcaattaacaactaccataagcttttagttgaccaaaaggtaggctatagtgtcggaaatcccatagtatttaatgcagatgatgataatctcactaagcttttaaatgacttactaggagaagagtttgacgatacaataacagaactatatctcaatgctagtaataaaggggttgaatggttacatccatatattaatagaaaaggtgagtttaaatatgtaataattccagctgaagaagcaattcctatttgggatagtaaaagacagagggaattagttgcatttattaggttttattatattgaagatatagatggaaataaaataaaaagagttgagtactacacagaaaatgacgtaacttactttattgaaagaggtaatagttttattcaagaatttttatatgatgaatatggaaaaatgactgatatacaagaaggtcattttagaataaataacaaagaacagggatggggtaaagttccatttataccttttaaaaataatgaaaagtgtgtctcagatttaactttctataagtctttaattgatatatatgataataacatttctacacttgcagacaatttagatgaaatgcaagaggtcatttatgtattaaaagagtatccaggaacaagtctacaagagtttatagataatataagatactataaatcaattaaagtagatggtggaggtggagttgataaactagagataaatataccagttgaagccaaaaaggagcttcttgatagattagaaaagaatataattatttttggtcaaggagttaatcccgaatctcaaaacacaggtgacaaatcgggtgtagctcttaaatttttatattcactacttgatttaaaatgttccaagactgaaaagaagtttaaaaaagcaattagagagcttttatggtttgtgtgtgagtatttaaagataagtggtagtaagagctatgattataagtcagttcaaataacatttaatcattctatgataataaatgagtctgaaaaaatagatatggcttctaaatcaattggaattatatcagatgaaactattgttagtaatcatccttgggttgaagatgttaatgacgaacttgaaagacttaaaaaacaggaagaaacccaaaaagaatatgatgatttaattcctactaataatcaagagggtgttatagatgaaacataaagattattggaggaaaagatttgaacaattagaagaagttcaaaacaataaaagtgtaaaatattatcttgaattggaaaagaaatacaaattagctatgaatagtatagaaaaagatatattatcatggtataacagatttgctgaaaatgaaggaatatctttattagaagctaagaaactgttaaatacaagagaattagaagaatttaagtggaatgtagaagagtatattaaatatggcaaagaaaatgctataaatcaaaagtggatgaaggagttagaaaatgctagtgcaagacttcatataacaaggcttgaagctttaaagttacaaatacagcaacacgtagaagttttatatggaaatgaacttgatggtattgataaactaatgagagatatttatacaagtggatactatcatacagcttttaatgttcaacaaggagtaaacgttggttggagtttaatgagtcttgatactaatagaataaataaaattatctctaaaccatgggcaacagatggattaaactttagtgaaagaatttggggtaagcatagacctactttaataaatgaactacatactaagctaactcaatcaattattagaggtgaaaatccaaaaaatctagtaaatgactttgctaagagatttaatgtatctaaatcacaagctaagaatttgataatgactgaatcagctttctttgcatcagcaagtagaaaagattgttttagtgatttagatgtagagaaatatgagattattgctacattagatttaagaacttcaaatatatgcagagagttagatggaaaaatatttgatatgaaagattatcaagttggaataacagctccaccatttcattgtcgttgtaggacaacaacagctccttggttcgaggatgaagaaggctatagagcagcaagaggagaagatggaaaaacatattatgtaccatctagtatgaagtataatgagtggtatgagaaacatatagagggtagacttggaaaagaaaaagctgacacccttagaaaaatgcaactaaatgagagtaaagatagaaaacaatttgaagaatataaaaaggtattaggaaatgaaataccttctaaatttgatgaatatcaacatatgaagtataatgatactataaggtatgaggaagctaaaaagctttataaggatgtaaattggcaagttaagaatcagagaaatttaactagtggaagtgttcattcagtgccatttgaatcaaaaccaaatagtgtatttgataattacaaagatggtaaattaattcaaagaagatactatggtaatacaggaaaacctagattagatttagacttaactgaccatagaaacccaaagcaacataaaattgtacctcataaacatgattggttagctgatgaaaataaccatgataaggtaaaaagagagaaggatatggagcttacaaaagctcataaaatagctaacaaagatattttgaatggagaataaaatggataataaatttaagaatttacaacatttaattgattctattgatttaggattagatatagaatttgacttatataataaaccatataatatatctattggagatgatgatacaaggtttattactctttgccctaatggagatacaaagtattataaaaatggtaaggatatggttgataattacaacattgatggtaaattactaaaggatttatggaaagatatacaaatagtaaatatgtaaaagcacttgctaaataataaattagtaggtgcttttattttgtaaaaaatgaaaggagaaatttaaaatggattggttaaaagaattgctagaaggaataaaagtagaggataacaaaattgatgtagcttctcttcaaaaatctatagaaaagaaaataaaggagactacagttactcaagaagattatgtaaatcttgaaacacaacttaatacagctaatgaaactattaaaaagtttgaaggaggtatgacaaaagaagatgtagagaatctaaaaacaacttatgaaactgataagaaaactttggaagaaacctacaaaaaagaaattgaagaaaaagattttaattactggttaggtgatgcttttaaatctgttaaatgtagagatgaaatagcgttaaaagctcatttagacatggaagccctaagaaatagtaaagatagacaaaaagcttttgaagagcaaataaaccctttgaaacaggataaagattatttgtttaatgcaacactagaaggtgaagaacctaaaatagatactataacaccagggcaagagcctaagataaatgattttggttttaattttactggggtaagacctcatgaaaataataataaataggaggaaataaaatggcagcactaaattatgcaaaagaatattcaaatgttttagcacaagcatatccttatactttaaacttcggggatttgtatgcaacagaaaataatggaagatatagatggacgggttctaaaacaatagaaataccaactatatctacaactggaagggtagattcaaacagagatacaatagcagtagctcaaagaaactatgataatgcttgggaacctaaggtattaactaatcaaaggaaatggtcaacattggttcatccagcagatataaaccaaactaattatgtggcttcaataggtaatataacaaaagtatataatgaggaacaaaagtttccagagatggatgcttactgtatatctaaaatatatgctgattggaccgcattaggtaacacagcagatacaactgttcttacaacagcaaacgtattagaagtatttgataagttaatggaaaaaatgacagaagctagagtacctgaaaatggaagaatattgtatgttactccagtagtaaatacacttatcaaaaatgcaaaagagatacaaagaacagtaaacataaaagatggtggaacttctttaaatagacaaaccacagatattgacacagttaaaataattaaagtaccatctaatctaatgaaaactgcatatgattttacaactggatggaaagtaggagcaggagctaaacaaatctttatgtccttagttcacccaagtgcaataattacacctgtttcttatcagttctctaagttagacgaaccaacagcagttacagagggaaaatacttctactttgaagaaagttttgaggatgtatttatattaaataaaaaagctgatgcaatacaatttgttgttgaagcatagaaaaaggagtgatatatagtgccacaagtaaaaaaactaaatagaatactaaccatagaagaatgtaaaatagatgatttcttagagatgggatatgatttgatagatgaaactggtaaggcagtaaagtatggcaagtcattaagtgtaaaagatttaatagctgaaaataatattttaaggtcaaaagttgagtctttagaagaagaaaataagcagcttaaagagaaaaataaacttactaaaaagtaggtgaaaattatggaaaataatataattgatgaaatagaaaaaagacttgaaagttttggatatatattaaaagatggagataagtggttaataggttttgtaagagaaaaaatagaaaatattattaaactagattgtaatataaaaactatgccaattgaattgaaagaaattgaagttgatatgatagttggagagttcttatttaccaagaaaaatatgggtcaattagatatagaaagcattaactttgaagctgtagaaaagtctatatcagaaggtgatacaaaggtagattttgctataggaagtggttctcaaacaccagaacaacgctttgatagcttaatagcttatcttactacttatggtaagaataagatattaacctttaggtgcttaagatggtaagtaaaactagaaaagcaatagaaatgttatatagagataaatgtactatagttgagtatcagccaattaaagaccctgtaacaaaacgaactaacaataaagaagtgattgtattagaaaatcaaccatgtaaactttcatataaaaatatagtttctgctacagaagggaaattagctaagctagagcaaactattaaactctttatatctccagatatagaaattaaagcaggttcaaaacttattataaatgataaagagtatgtaagaagtggagaatcagctatatatccaaatcatcaagaaataatacttgagttatttaaggataaagcataatggctagatggggcagtgttgattttagagagtttaaaagagtttgtaaaaagatggagaaatttacaaagattgatttagataagttttgcaaggatgcagcaagagaattagcagcaagactcttaggaaaagtaattagaaggacaccagttgatacaggatttttgagagagggttggagtggagtagcttatgctaggtcgcttcctgtttacaaacaaggtaataattatattatagaagttgttaatccaactgaatatgccttaacacaatggggcatataaaacccagcaaaatcggtaaacgctaagtgtaatagtgttacattataaagtaggtagaatatggacatagaataactcttgatttataatgtataaaagaggtgattttatggcaaaatttttagatattacaggaaaaaaatttggaaggctaagagtcattaaattttctaaagagataaaaagcggtaaaagaaataggaaatattggttatgtaagtgtgattgtggaaatttcaaagaaataagaactgactctttaactagtggcttagtgcaatcttgtggatgtttaaaaaaagaacaagataaattaaatttaacagacaaataccaatttaaaaagaaatataaggttcaaaataaaagactttacagtatatggaagggtataatatctagatgtacagataaaaataataaaagatacaatagatatggtgaaaggaatataattgtgtgtgatgaatggttttgctatgataattttgcaaattgggcattgagtaatggatattcagagaaacttacaattgatagaataaataatgaaggaaattatgaatcaagcaattgtagatgggtggatataaagacacaatgtagaaataggtcaacaaatatattagtaaaacatgaagaaaaagaaattacattgatagagctttctgaaaaaacaggtatttcatactcttgcttaagaagtagatattctaagggattagtaggaaataagcttatagaaaaagttaagattattgaagaaagcagagctaagttatctattgaggatgtaaaagaaattagaaaaaagtattctgatggatatacaataaaacaactaagtgaaatatatcctgtaacatattcatctatatcaaatatagtccatagaagaacatggaaaaatatttaattaattatatatgccaataccgaggaaaacctatagattgcggataggctataggtttccgtagagcgtagagagtgaataaatataatctctccaagagtgctgggcaactaaataaagtttattttgttgatgatgtacgccgaacttataggaaactataagagctagaggataaaaagcctttaggataacaaaatgcatatgttgaatttggtcatagaactaaaaatggcaagggttgggttaaaggacaacatttcttaactatttcagaaatggaactacaaagtcaagttgataagataatagagaaaaaactattaatattgcttaaaggagtgtttgatgcttaataatattatagatggaatatcagtaaagttagataaatcgtttggagaaaaatatacaatttatagcgaagatgtggagcaaggtattaatgaaccttgtttttttattgttcctttaaatccaagcaagacaccatatccaagcgggagagaattaaagaaaaattcttttgatgtacattatttccctcgttcagaagataagaattttgaaataaatgagatagctgagatgctactggaggaattagagtatatagaaattgatggagatttagtaagaggtacaaatatgaattttgaaattatagacaatgttcttcacttctttgttgattataactattttactataaaaaataatgataccaataagatggatacagtagagttattcggtggtttgaagagaggtgataattttgagtaaagcattaagcaaagaagataactacaagtttactaaggagcagatagttaactctaagaagtatgtaaatagaaaagatttattaaatgcaattttaaaagaaaatgagttatattccttctcagaggtagaggatagaataaataaatttatgaaaggagtgagttagatggctttaggtggaggaacattcgtaacgcaaaataaaatacttcctggtgcatatataaattttatctcagctaagagggcaaccagttcattatcagatagaggtattgttgcaatgcctttagagttagattggggcatagatgaagaagcattccaagtaaccagtgatgattttgagaagtattcagtgaagtattttggatatgattatactcatgagaagctgaaaggtttgagagatttattcaaaaatataaggttgggatatttttataaattaaataaaggcgttaaagccagttgtactatagccacagcaaaatatagtggtataagaggaaatgacttaaaagtaacagttacaacaaatatagatgataatgctaagtttgatgttgtaatacttttagataataagaaggtagatactcaaatagcaaaggttattacagacttacaagacaatgactatatcacttggaagaaggatgcaacactagaagcaagtgcaggacttgtatttactggtggaaccaatggcgaagctgtgacaggagcagagtaccaagctttcttggataaaatagaaagttattcatttaatgcactagggtgtttggctacaacaacagaaattaaaagtttatttgtagaatttacaaagagaatgagagataaggtaggagctaagtttcaaacagtactatataagaaaagtgatgcagattatgaaggtgtagtgtctatagaaaataagattaaagataaagatttagttgaatctagcttgatttattgggctactggagctatagcaggatgcgatataaataaatctaatactaataaaaagtatgatggtgagtttgatgttgatgttaattatacacaaatacaacttgaagaagctttaaaaactggtaaatttatattccacaaggtgggagatgaagttcatgtgttagaggatataaatacttttgtatcatttacagatgataaaaatgacgatttttcaagtaaccaaagtgttagagtacttgaccaaattgctaatgatattgcaactttatttaatgaaaagtatttaggtaaagttccgaatgataaggcaggaagaataagtttctggaatgatgttgttaaacaccataaagaattagagaatataagggcaatagaagattttaaaactgatgatgttagtgtagagcttggaaatgataagaaaactgtcatagtatctgatgctattaaggtaataaatgctatgagtaagctttatatgactgtttcagttaattagagaggagagtgataatatggctcaaacaataaatgctaaagatacagttagtgcaaagaaagctgaatgttttataactatagaaggtaaaagatataattttatgcaagctatagatttagaggctaaaatggaaaaaaataaaagtgaagttccaattctaggaagaacaacaaagggaaataaaacaactgggagtacaaatactggaagtgcaacatttcattataatacttctatttttagagaattactttacagatataaagaaactggtgaggatatttattttgacatacaagttacaaatgaagaccctacatctgctgtaggaagacagacagtagtacttaaagattgtaatatggacagtggaataattactaaatttgatgctgatggtgagtatttagatgaagatatggatttcacttttgaggattgggaattagttgaatcctttgcattacttaatggaatgttataaaattgaattatacttgaaaaatattatgatgtaagtataaattatttggaggtatttcatggaatttgaaagtggaattaaattaggcaaacttactttaattaaatatttagggagaaataaacatagtaaaaaagtctggctatgtcaatgtgagtgtgggaataaagttgagagagtagaaaataatttaaagcaatcaattaaaaatgagaagcctccacattgtggttgttctccaaactggaaaggacaaaataagagatttaaagatataactgggaaaacttttgggaagcttacagtattgaaaatgtctgggaaagataaatatagtcacaatttatggttatgtcaatgtgaatgtggaaatagaacaataactagtacaagtgcattagaacaaggaaaagcacaaagttgtggctgtataagaaaggaaatattactagagcgctctacaacgcataataaatctaatgatagcttatatagagtttatcaccgtatgattaaaaggtgcacaaataagagtaataaagattataattattatggaggtagaggcatagaagtatgcaatgaatggctagaggattttataaatttttataactggtctatagaaaatggatatagaaaaggtttaacaatagatagaattaatgtgaatggaaattacgaaccatcaaattgtagatgggttacttgggaagttcaacgaaataataaaagaaatagtattagagttaattataaaggtgaaatgattactttaaaacaatgtgcagaaaatttgaatgttaagtatctatttctttataatcaattagttactaaaaaaattccattggaagaagtaataaaaaatataggtatggagtaaaatacacatttataagttataaatgtgtattttttatatgaaaaattaaaataaaaggagattagaataatatgagtaatttaagtgcttttttaagtcaaaatgcaataaaggttgataatgtaaaatatgtagcgagtaacagatttttagataaagaagggaaaccagttgaatgggaattaaaagttttatcatctgaagaagacgaagcactaagaagaaagtgtactaaaagagtaaaagtgattggtaacaatggtaagcatactggacaatatacaagtgaaattgactacaatagttatgtagctgaattatgtgtagcatctacagtatttccagatttaaaggatgccgaactccaaaatagttatggagtaatgggagaagctcagttattaaagacaatgcttacagcaggtgagtatgtcaattatacagtaaaagtgaatgaagtcaatggatttgatacatcttttgaggataaagtagaagaagcaaaaaactaatcagaggtggcgattttgatgctagcatcactcattattgtattcaaaaattaaagtggaagccaagtgaatatatgaatttagaagttaatgagagagcgttagcagccgcctcaatacttataaagatagaagatgaagaggaagcaatgaaagaagctgaaagagagagaaagaggggacgaagaagatagcaaaataaaaaaataaatatagaataggtaaaatatgtaataattatatgttataatatttttagcaagaagatgtaatctacaatttatagagtggagttcatactgggataaaacctacttcctaatgaaaggaggtgggaagtatgaataactttttacttaatgtaatagctggcgttattgctagtttaatattttgcttaatttgtaaagtatttctaaaagtaaaaagccactcaactcgtggcaagagtaaaagtggctgggaatttgattttaaaatcaagttccacaaatttaaataattactaattgtttaaattatgaacttcactctactgtcaaatagattgtagttcttcttgcttttattataccacaaattagaaaaaatattgtttatataaaataaaaaataaaaatttttattaaaaaaatgaaaacttgattataaagcaattaatttataaaatatatataaataagtaggtatttatttacttgaatttcattgtttatataaaaaaaatggaaaaatatgtaataattataggttataataattgtagcaaggataataatcgaaagtgcgaagggtgattattttcatattaaacgccaaattccaaataaggaaggaggtgaaattatatgataggttttttattaagcatactagctggtgttatatcagcttatatttatgacaaaataaaaaatcacccagacgccaataagggtgatttaaaaaaataatattttcacttaacaactgaaaataatcactctttgtaggaataaattatttccttgcttttattataccacaaattggtacagatattcaaaaataatatttttatgatataataaaaatgtagagattttgcagtgagcgatatttgtgataaattgaagtttaacagttgcaatataaggcgttgagggtgtgtgataaatgttatcaattgcactactcatggttcactgcaaatttaagagagttgtatatgtgtaggtattgaaaatactcaacttattttggggttttagattaactatatggaatgtaaatgttgtaagaagtatcattctattttttaatctttctgttttagattaactatatggaatgtaaatttcagtgagaataagctttattgtcgatgtaacactcgttttagattaactatatggaatgtaaatagtacatataatgagtctttaacatcagttatgaaaggttttagattaactatatggaatgtaaatgattgtactttagcgtctgcactagctttgtctatcgttttagattaactatatggaatgtaaattattttacagatgaacaattacagttacttcttgaatgttttatattaactatgtggattcaaaattaaatagaaaaaagaaagcacttacttaaatagtaggtgcttttgttttgctcaaattacttaattataaagttgctaagtacaactttttagaattatacaatataaaaatgcactaaagtgattgattttgctcaagttggtcggttgagtaaaataattagaaaaaaatgttaaaaaactcttgaaaagtgtcgcgatacaatgtataattatattatcgcgatacagaaaagaggtgaaaattattactgatagcagtagagcagattacttcaagcagagacgacagaataaaaaaacttttagtgttctactagatagagagaaagtagagaaaattgaagaacatttaaaaaagcagaacaagactaaaactatttggcttgaagaaaagattaatgaagagctagaaaaagaggaataaaaaataagagacgttctccccgaccaaagattgaacatcccttattgacgtatattatatacactaactatagtatacgtcattccttgaaaaaattcaattaaggagtgtaatagttatgaaaaatttaatagtaaaagagttcaatggaagtcaaatttatacttttatgtggaaagaaaaatcttgttggatagctaatcaaatagttggattattcgattatgctgatgtatctaaaacaatacaggattgcataaaagcagaagactttgagattgaacaagagtatgatgtattgaaaggaaatgaatttaatgattttgtaactactttaaatgtagtcgcaaataatataattagtaataaagctagaagtataactattttttatgaagatggtttatatggatttttacaatacacagacaaacctattggtgtacagtttaggaaatggcttagacgagaagttttaccaagcataagacaaactggtgcatacataactaacaatgctaatcccgaaaaactaagagaaaaagcaagtgagattgagaaattacagttagcttacaatagtacatctatgttaaaagaactattagatggtgcaggctttgacaataaatccaaactattaacagctaaaacattatataagaaagcaggaattgatttaccaatagagataaacgaagaagaacattattttgatacaaagcaaatagcatctaaactgaaaatatattctaagagtaataaaccagcacagttggctgtttgtgaaattattaaaaagattgatttagaagaaaacgaagtcaaaggcgtttgggaaactaatggttcttggactggtactgtaaataaatatacaaagagtgtaatagataaggttagaaattggatagaggaaaataatagacctactaagattgcaggtgaaaagaagaattatcatgtggtttataagattgagtaaatttataagattgtattaaataatttagtttagttttggggggattaatacaatgcatgagaatttacttgatagtatagatattgaaaagagaaaagaagaatttagaattaaacttttgaaaataagagaaacagatatagatatatataataagatagaaagtatagtatataaactttcttagaaaaaattagagaaaaataattaaataaatagataaagcacttggatatttcactgtttcaagtgctttatatggtaaaaaatggtataataaaatataggaattttgcagtgttcgatttttctactcaagtatagtttaacaattggaatacaaggcattgagaaggtttgataagtgttatcaattgcactattacccgctcactgcaaatttgagaaagttatatgtgtgtaagtcttggaaatacacaatttattttggggttttatattaactatatggaatgtaaatctttgtaatggtagtgtatttaagattgaaacatcaagttttatattaactatatggaatgtaaatcaacattagtagttgtctttatacacatagcatcacgttttatattaactatatggaatgtaaatacagctcccaagacatacaacgaatctgtaacatcagtgttttatattaactatgtggtatgtaaaagacttatttacagctttatttgctaaatcagaaggttttatattaactatgtggacttaaaattaaaaataattaaaaaacacttactaatgtaggtgtttttttattgaaaggaagtgattataatgtaaaaattttgaagatatagtataatattcttataaaatataatttagggggatattatgagagaaggaaagagaagaagaggatgtctattttggtttattcttattattttattttctggagttgttggagcaatagcagggaacagtactaataatgaaagcactgaaaaacagaaagaggatttaactaaatatattggtgaagaaggtagtataggagatttaaaattaactgttaatagcatttcaaaagctagtgaaatatcagtagcatctggttatttagcatacactccagatagtggcaaatatggtattataaatttaacaataaaaaatcaaactaaggaaagccaatcttttatgctaaattcattcacattaataggaccagatgattcaaaatatgttccatctttattgattgatgtaggaaataaatatataactatggatactgtaaatcctaatttagatgtaacaggtaatattgcatttgaaattcctaaggatttactagtttctgattgtaaactaaaatatagtggttcagagcaagaatttatattaaaagaaaaataatatatagatttaaaaatatgaagcatttactttaaataagtaagtgcttttttaattaaaaggaggtgataataatgtaaaaattttacttatatagtataattacattataaaattattgtactggggggaatcttatggggttatttggaaagaaaaaagcagatatatgttgtatttgtaatactgagataggagtactgaatattgaagatggttggatatgcaattcttgttttaaagaatattgtgatgcactttctatgactaaagcacctaaaattttaagaaaattagatattgaaaagactatatcatcaactaaaaaaaataatgaacttcaaaaaatatttaatacaactaataatatagaaaactatatagaatttgatgaagataataaaaaatggcttgtgtctaaaaaaagtataaacgataaaaaaactcctatcattcattcttatgaagatatcgtgaaatttgaacttcttgaaaatggtgaaactgtaactaaaggaggaataggaagagctttagcgggaggaattttatttggagaagcaggagctatagttggagggataacaggtaaaaaaacaacaagaaaagttgttgatacatttaaaattaaaataacaattaataatattgataatcctattgagtatatcgaattaattaataaaaaaacaaaaactaattctagtgcttatgagaaagcttacaaagatgcccataaaattttatcaacattatctgctattacacaaagcattaaagagacagacaatataaatactaaatctgtagcagatgagatattaaaatataagaatcttttggatatggaagctattacacaagatgaatttaatactaagaaaaaagaattattgaatttgtaatataataaacacttactaatgtaggtgtttttttatatggaaatttatgaaaggagagtgagaaagtggcaacgatacaaacttcaataaagattttcgacggaatgacacctgcttttaggaatatgactacatctattaatacgacaattaatagccttgaaaggttacaacaaagattgcataatccgcttaacacaggtgggatacaagcatctcaacaaagtttaaacaatattgaaaacatattaaccaggatagaacagaaaattggaagaaatacaaatgaacaagaaaactttaataataagataaagcaaggaagtgaagcaggttctctattagtatctaaactcaaaagtttggctggcatatatattggaataagaggtatagaaagtattacaaaagcagcagatacaattgcaagtacaaaagcacgtttaaatttaatgaatgatggattacagacaacagaacaacttaataagatgatttatttatctgctcaaagtgcaagagctagttatgcagatacggcagcacaagtcgctaaacttggaatattagcaggagatgcttttggaagttcggcagaggtgataaagtttacagaacttatgaataaagcttttgtaattggaggaacatcagcaaatgaagctagtgcggctatgtatcagcttactcaagctatgggtgcagggaaacttcaaggtgatgaatttcgctctataatggaaaatgcacctttattagccactaaaatagctgatgcaatgggaaaaactaaagaccaattaaaggaattgtcaagtagtggagcaataacagcagatgttataagaaatgcactatttaaagcttctgatgagatagaaaagaaattcgcaagtatgccagtcacttttagtcaagcacttactatgatgaaaaatgacgcctacatgatttttgggcaaaccctcggaaagataagtggagcattgcaaagcgttagatttagtgaaattgttgtatctataagaaatgttatgattgcaatatcttcaaacatttacgatacattaaatattataaaaaatattttaaatagtgaattcttttcaaacttagtgcaaggatttacattttgtgcggtagtaataactaaaagcttaggttctattgtaaatactgcattaaatatagttaatatatttgcacaaaattggagtataataaaacctattgtatttggtgtagcttctgtttttatattgtttagaggggttttgctagcgactaaaatagctacaataggtaacgtaattgcgaatgttgctcacgctgcttcctcttcactatcagcacttatgactaatatacaagcagcagcactgatgcgttcgaatggagctactttatcagcaacaatagccacttggggtttaaatgcagctttattagcttgtccaatcacatgggtagtattaggtattctagcatttgtagtagtagtttttgttgcagtagcagcagtaaacaaattcgcaggtacaagtttaactgccttaggagtaattgtgggtgctgtatttgcagcagtggcagcaatacaaaatgttatgatttggttattaaatggctgtatagctgtaaatgaaggcattacaaatggttggaatcaatgtgtatatctaatgaaacaagctattgcaaaaggtgtaatctttataatcgagaaaatggcatctctaaataattctgtaaataatgctggaaatgcacttgggaaagctttcatagatggggcaaatatcgcaatacgaggtgtaaacaaattaattgacctaataaataaaataccagggataaatattggtaaagtaggagaggcaacgtttacgccagttaaggcagataatagttacatcaaacaacagattgatagcttaaacagatgggtaggagacgcaccagagaaagtaaaattggagcgaatgggatacaaagatattggagcagcatttcaaaaaggaaatgcacttggaactaaatggcaaaatgctataactgataaatttaaagatacttttgacattaataagatgctagaagatgcaaagaaaaaattaggattagacgatttgtggaataaacaaaatcctttaaacaaccttggtggatttggtggagatttaggaaaaaatgtaaaggacacggcaggcaatactgcaaagatggcaaagactatggataaaagtcaagaggacttaaaatacttaagagatatagcagagcaagaaacaatcaatcgattcacaggagtaaacattaaaatagatatgaacaatacaaacaacataagtaaagatacagatgttgatggaatagttaatgtcttaactgaaaaactgaacgatgctatggttgtatcagcggaaggaatagtttaggaaggagagtgagaaaatggcttatgatttttacctagatggagtacaactaccaatcgcaccacccaagcttgaagtcaaagtgacaaacaagaacaagacagttgatttgataaatactggagaagtaaacatattaaaaaaagaaggattatctgaaataagttttgaagcagaatttacacataataaactacctttttgtagaggtcaatttagagatgttcaattctttttaagtaagctagaattactaaaaactgattgtaagccatttcaatttattgtatctcgtgagttaggtaacaaggtcttatttaacactaatataaaagtatctcttgaagagtatgctatttcagaagatgcagataatggctcagatacaaaagttgcaataaaattaaagcaatatagagattactcaactaaaaagttagttcttgcccctcctaaaaatgagactggtagacctaatgtaaagatagagccaaaacgagttgattcagtcaatgccacaaacactaaaacatatacagtaaaagcaggggatagcctttggtcaatttgtcagaaacaacttggtaatggttcattatataagaaagtatacgaactaaataaatctatgatggataaggcaaataagggcaaaaacttaagtaaatacactatttataaagggcaggtgttaaaacttggttgatgaattagtgttagcaaatgatagagatgtaagattagtaatagctcattgggaagatttctacgaacctgctgtcattgatggtatcacatgggagatagaaagacgaggtacaccttctaagttagagtttacaatagtcatggatgatatactagagttttgcgaaggaaattctgtaaggctgtattataaaggaataggcatattttatggatatatatttcaaaagaaaagagataaagaaaatcacattaaaattgttgcttacgaccagttgagatattttaagaataaagatacttatgtatatagtaataaaactgcaagtgaacttgtaaaaatcttggctaaagattttaatttaaaatacaatgtcatagaagatactaagtataaaatatctagagtcgaagaaaataaaacactctttgacatgatactaacagcactagatgatactttaagagagaaaaaagaaatgtataccttgtatgatgattttggaagaataacattaaagaatgttgcatcaatgaaactagatactgtcatgaacaatgatgtaattgaggattttgactataattcatcaatagatagtgatacttacacaaagattaaacttgtaagagacaacgaggagtcaggaaaaagggatgtatatattgctcaagactcagctcacatgagaagttggggaatacttcaaatgtttgatacagtagacaaaaacatgagtgaagcagagataaaacaaaagtgtgatatacttctaaaactatataataagaaaactaagtcattaagtttaaaaaatgcacttggagatattagagtgagagcaggttgtttagtacctgtttttttaaatctaggagatattgaattgcaaaattatatgttagttgagaaagtaaaacatacatttgaaaataattcacatttcatggatttgaccttggttgatggagacgaatttgcttcatattcttcaagctcatatagtagtggaaatactaataataaagatgaaaagaaaaatggtcctgcacaaagtattatgaaaaaaaatacaggtaaaaaagttcctgctatatttactgcatattatccaggaaacaatgcaatggaaggtggaaaaacagattgcaatggaaagccacttgatgtaaaatcaagaactgttgctggtccaatgaatcgagaaggagttaagaaaacttggtatactgatgattttctaaataaacatccagtttttgaatatggagataaagtaaaaattatacttcctggtactgcctatgacaacaaagtatatacagttaaagataatggaggaagaatatatgttgaaacaaacggaacatatcatatagatatactattagctaatgctagtgaatgtaaaaaatttggtagaaagaatggctatataattataggtggagatgaagaacaaacatatcaagttgaaggtaataaccaaagtaatacaaataacaattctaaagaagataaattaattagtatagcaaaaagtaaactgggttgtaattatgtgtatggagcagaaggtcctaataattttgattgcagtgggtttactcaatggtgttataaacaaataggtataaaaattcctcgtactgcttctgcacaaagtaaagcaggaaaagcagtagatttaaaagatagaagcaagtggaaagcaggagacttattatgtagaattggtggaggaagtagtaatcatgttgtaatgtacattggaaacaatcaaataattcattcaccacaaacaggagatgtggtaaaaatagagtctgttaattcttatagaaaaggaaaagcatacacacatgtgagaagatttatataagtgaggtggcaatatgagccaagatttattacagataataaaaaaagctgcaatggatgcagtagaaacaagcaacccaatgagggttgtatttggaacaatagaaagtattagtcctctaagagttaagatagaacaaaaactatctattggtgaaatttttctaatacaaacagatacatttaaaagatatacagataaaaaaatgggagataaattagtcttaattcgtatgcaaggagggcaacaatacttgattttagataggatgtgataaagtgttaccaagtgataatttagattatgatattgaagatgtatcaataattaattttgatgtaagacaagagccaagtaagacatttaaacttcatatagaaaagtctaagattgatggtatttgtgatgatgtagaagcattaaaacaaaccatttttttaattttaaatactgaaaggtatgagcatcttatttattctagaaattatggtgttgaattaaatgatttaattggagaacctatttcatatgtaatacccgaacttgaaagaaggataacagaagcactaattcaagatgataggattgaaaatatagataattttgagtttcaaaatataaagggtaaagtacaatgtagattttcagttcatacaaaatatggaaatataaaagcagagaaggtggtgagtgtataattgtttgagttaatgacatttgaaaatataattaaaagaatgttagatagtgtaccagatacttttgataaaagggaaggttctataatatataatgctcttgctcctgttgctatagaacttacagaaacatacattgctatggatgaattactagaccaaacattcgtagatactgctagttattattatttagagaagagatgtaaagaaaggggaataacaccacttgaagccactcatacgattgctaaaggagtttttaacatagatattccacttgattctaggtttaatctaggagaatataactatgtagcaattgagagaatatctgaaaaaacatataaaatgaaatgtgaaactactggacctgtatttgagttaggaaaactaatacctattgaatatatagatggtcttgaaactgctgaactaactgaaatcttgataaatggagaggatgaagagtcagaagatagtttaagacaaagatattatgatagcctaaattcacagagttttggcgggaatatacaaaactatagggatgaagttaacaaaatacaagatgttggaggagttaaagtttatccaacttgggatggaggtgggactgttaagttagtaataattaactctaattttaaagtgccaagtgaagaattagtaaacttagttcaagaagaaattgacccaattggacaccaaggagaaggcttaggattagcaccgattggacaccgagtcacagttgaaggagttacaagtacaactataaacatatcagcagaaataacatacaaaaatggctacacttgggagaatataaaatcaattgcagaagaagcaatagacgactatttaaatgaacttaacatgagttgggaagatgaagaaaacttaatagtccgtatatctcaaattgaaactagattacttagtattgatggagtattagacattgcaaatacaatgataaatgatgttaaatctaatctaacaatagatagtaacagcatagtagtgagaggtgaggtagttggataaagagattaatctaataaattacttgccacaaattctacaagataaagaagaatatataaaagtatttaatgtagaaaataaagaaataaaaacactacatgataaattaaaggacctatcaaatgaccagtttttagaggacctaactataagtggtataaaaagatgggaaaagataatgtctataactcctaaaagtaatgagagtttagaagatagaaggtttaggatttttagtaaatatataagtaaattaccttactcagagagatttttaaggaactggctagataatgtagttggagaaggcaattatgaattaactattaataatgctacttataacatacaccttgagagtgatgctagaaatcaagattggtttgaggaagttcattcttttgtaagtaatattaagccatgtaatatgactttagattacactagagtgcttataagcaaagacaattatatgaattttggtataacaaccctaatgggtcaagaaataactatatacccttggagtccaccagatatagaaacttatggagaaattgatgtattaactggcaatggagttggataccaagagataacaatattttaggaggtgatatattggctatagataaaagttattacactataattacagatgtaggaaaagcaaagatagcaaatgcaagtgtcacaggtaataaagtagggtttgtaaaaattcaacttggtgatggtggaggaagtgagtatactcctactgaaagtcagacagaacttaaaaatgtggtatgggaaggcaacatcggaaatacaaccacagatgaaactgcgccaaactgcataatattagagagtttaataccatcaagtgtaggtggatttatgataagagaaataggatatttagatgatgaaaataatctaattgcaatctctaaatataaagaatgttataaaccttctatagaacaaggagcagttgttgatatgaaggttaaaactgtgcttattgtatctaatataaataatatagaacttaaaattgaccctacaataatttttgctacgctcaaagatatacaggatttagatgctaaaataagcaatgtaaacactaaaattgatacaactaaaacagagttaacaagcaacatagaaactgctaagacagagttaaacactagaattgacacagaaaatgagaaacaaaatattaaaattgaccagctaatagcaggtggttcaaatgttgcatctactcaaacaataacaattgatgattggatagataatcaagaaggtggattcaaagcaactgtaacacatggtttattaacacagagaataactgtaagtattatagatgctactacaaaagataatgtagtacccgatttcacaattatagacgataattctattgaggttagaagtggagtaaaagttgagttaaatgtttatgtgattaatgggaatgcagagactcattttattaatgcgactgtagatgataatagagtgtctgaaatgactacttattcatcaaaaaagatacatgaagaaattggtaaggtagcagagcaactgacaggaattaatagtaatattatatcgactgtaaataacgacatactacctatatagaaaggagcgtgaaaaaatggcgttatcaatgagttattttaatttacctgacaaaagaaaatatactaaaaatcttgcatttaatccatttgcaggtggaaggcaaaattttgagtggactggtggtgaccatggactaaatggtgagtttaaagaaacttgcttaagttgcacttacaatggttcaacattaaattggggttcaggaaatgtttgggtcttgggggaatatggtcaatatacatttacttataattgtgaatcaatgcatgtggatacacaacaaaaatttccgtatacttctaatagaataataactataaaaggtagacctgtaatatctggttcagatacttcacttgggaataaaagaaaaggatttagtgtagattttactgtaagtgatgatactccaaatgttaatttaatagtacgtgcttatcttgatgataaattaatacaaaacattactcctgttgtacaaaattcaactttaacagcaacagtaacagatagtcaactaaactctttatccgtagatggaaatcacaaactaaaaatacaattaaatgatggatatgataattttgatagaatttttacttttaaaaaaatagaaaagggaattgatatatcaacatcattagtaactgatagccaagctaagtttactgtaacaaaaatatacagtgaattgacaaaaatagagtgttatttagatgaaacattaaaagagacttttactacagacttgtattcagaaaagactataaactatgaacttatagacaatgcaatacacacattaaaaatagttgtaactgatgcagaaaatgttgtagaagaaaaagttataagtataagtaagaatataatgccattgcaacctgatgcaacattacaagatatatcaactaagttaacagagattgggcaaggcgttagaaatggtaaaacaagcattataaatactttagcattaaagaatatagatgcaagtttaaataatacactcgttgagttatcagagaaaattaagggaggttttgatagtggagacgctagtttacaagatttgatgaatcaattaacacaagctaataatactatatcgcagttaaatactaagtataaagttgctagtggtacagttacttcttttgcggatagtactaaaattgcttatccatatctaaccgacaatgttactaaacctggttcttggattaaagttagtaatttaggctttaaacctaatattttctttgctgattttgattactatgatgctgaatataaaaataattataaacttttccttttcgcttgtaatggtgttgccacacaaagaggtgttgatttttcaagtgttacatcttttatcagaaaaagtggtgatgagtattttcatgctaatggatggctatatagtaactcagagggggatgtctattttaataatactggcgttcagattccagcttataactttgattcaactcaaaaacatacttataaatggtatgctattaaatttatttaaaaggaggaaaaaacatgaatgttccaaaccgaataatatatgaccaaacaggtagaacaatctttgaaacaggcgaatcctgtggagatgtattgccacattatacaataacggaattgcattatatagatattgaatatggaagtatagattatacaaggaatagagttataggtataaatatagaaacaaaagaaccgattttagaagaaataccagtatatataacagatgaggaaaagagaatacaagagttagaaaatcaattattaattgcagaaaatgagaaagtaggaggattattataatgaatataaataatgttgtagtaagaatattagcagaaagaatattaagtaagggattaaatcctctaaaaaatagagaatttcagttagatgacgtgactaacacagagtacagaaaagctgtagaggattatattataaaaaatagtggagtagtagaaggagcagaaccaactatatagagggttctttttttattgaaagaaggtgactaaatgacttttaaagagttggttaataaagttagaaatcttgtattagaagcaaagaatgtaactatagaagatacagaaagtaaatttacaagtgaaaatgtagaaggagcattgaaagaatgtatagatagagcagatgaggcttttcaagaagccgatagtggaaaaacacttttatcaactgctatcggctctcctactacatcagaacaaacatttcaagattatgcgaactatattacaggatttaagagcaatataagcaatttagaaactcaattgaaaagcaaatattctattagatatggtcctattgatggatatgatggtaatcctttttctgctaattttggcaagagtgcaagttaccttattgtctatgtttactttagaagaagtgtatattattataatcccagtggtagttctttaggaagtaatacaggaggttctgaacgtgcatggattactataaacagcaataaaactggtttttcagttcattcatatgatactagttatgagtcatatccttttacaggttattatattgcttgtttcgcataataaattatattattaaaactaggaggatgtatggaagaaattagcataaatctactatgtgcagtagcaggagttgtaatatcctacttagcatttagaaataactcaaacagaaagatacaagatgaaacagaaacaactacaaaattagaacaacaaataacttttttatgtgagaatgtaagagatataaagcatgatgtagcaaagtttaatactagtttcttagatattagtgaacgagttgcaaaaatagaagcaagtacaaaacaagcacatcttagaattgatgaaattgtaaatagaattggaggaaaataagagatggataatttaataagttttataccagagcagttgctaattttagtagctgctctctctattataggtaaaggttgtaaaaaatataaacaattagataataaatacattccagtagtgttactgatacttggaataggtttctcaatatggatgctaggattaaatcctgttgcagtcttacaaggtgtaatttgttggggagttgcaataggtataaatcaaacttacaaacagttgaaggatggtgaaaagtaatgaaattaacaaaaatattattactcacaaaaatttaaaaaatttcattaaatagagtatacttttatagctaataagtatataataatagtacagaactcgtaaagcatttatatgctcaaatatacgggacattgatttttgaaggaacccgccaagcttcttttatagctcaaataggcgggacagataaatttacccactaatattaattggtgggttttattatataaaagtatatctatgaaaaggtgaaaacaatggttgaagtaaaagaagaaaaaacatttgatgaacaaatagatattttaaaaagtagaggattaataataaatgataaagaagatgctaaatttgtattaagtaatgtcaattattataggtttacagcatatcttctaagttttaagaatgatgatggctcatataaagaaggaactacgtttgaagaagtttatgatatatataggtttaataaggaatttaggatattattaacagatttgttagggagcatagaaatagcatttaggacatacattgcatatacattagcaattaaacatggtgcttgtggatatctagaaagggagagtttcaaagatgaaaaattctatattaattttttgacagcattagagagagaaaaaagtaataattcagataagctttttattatacaccataaagaaaaatatgaaggaaaacttcccatttgggttgcaacggaaataatgacttttggtatgttgtcaaaattatattcaaacatgttgccagaagatactagatacataaaaaataatttgtgtagagtgaatactttattagttaaatcttggttacaatcattaacacaggtcagaaatcaatgcgctcattatggtagaatatataataataatttccgtattataacaataaaaaacgaatataaaaagtataacttggataataaaaagatattttcttatatacttgctatgaagcatttgactatggataaattaatttggaatagtttttttataaaacttcaaaagttaattaatgattataataattctatagacttaaagcttattggttttcctaataattggatagagatattggctaaataaaatagttactttaagaagtttataaacacttactatatgtaagtgtttttttattgaaaagaaggaggaaaataaataatgaaaatatgtattacagtaggacacagtattttaaaaagtggtgcatgcacttctgctgatggagtagttaacgaataccaatacaataaatctcttgcaccagtattagcagatacatttagaaaagagggtcataaggcagatgtaataatatgtcctgaaaagcagtttaaaactaaagcagaagaaaagacttataaaatacctagagttaatagtggaggatatgatttacttatagaactacatctaaatgcaagtgatggtcaaggaaaaggttcagaagttctatattatagtaataaaggtttagagtatgcaactagaatatgtaataagctaggtacagtatttagaaatagaagagctaaattagataaaggattatatatcttaaatagttcaaatcctacagcagtattaattgaaagtttcttctgtgataataaagaagattatgagaaagctaagaaactaggtcatgaaggtattgctaagttaattgtagaaggtgtattaaataaaaatataaataatgagggagttaaacagatgtacaaacatacaattgtttatgatggagaagttgacaaaatctctgcaactgtagttggttggggttataatgatgggaaaatactgatatgtgatataaaagattacgtgccaggtcagacgcaaaatctttatgtcattggtggtgcagcatgtgagaagattggttctatgactaaagaaaaatttactatgataaagggtaatgatagatttgatacactttataaggcattagattttattaatagatagattatataaaatattttagtatttcttgaaaatcataagtatggtaatatttagataaatattatttattattaataggtatggggggagattatgatatttaagaagtatataaaatcattactgatagttgttagtgttacattgataatgaacaaatcaatattatttgtaaatgcattagatttagagagtaacaataacataaaatcttataaaagaaagaatgtaaaggaaattgatataagcaataaatttgttgatgaatcctttagaagagatattgttgaaaaggtattagataatagggatgatccattaacaaatgaagttgcatcaaaagataactataaaatatatgaaagtgatttaaataaaattgagagttgcttagagttagatttacataaaaatccagatgtttctaatccaaacaaaatagataatttagatgggatagaaaattttagaaatctagaaaagcttgattgtagttcaaataatctagaaagtgtagatttaagtaaaaatataaaattaaaatatctagatattagtggaaataaaatattaaacattgatttaaaaaacaataatcttattaatgaattacattgtgatgcaaataaattatcaaatttagaccttaaaaataataaaaatttggtaagtttattttttactagtaatgaattaacagagatagatttaagtaataatgtgaacttagaaaatttacaatttcttaataataatttaaaaagtatagatttaagtcataataaaaagttgaaatctctaaattgtactaacaataaacttaaatcccttgatttaagtaataatgtttttttgaaaaatttaagttgttcaggtaataacctgagtaaattaaatataaaaggacttacaagtcttgagtatttgggatgtgctaagaataaattacaagatttagatgtatctacaaatataaaattagattctttactttgtgggaaaaatagtttaacaaaaatagatataagtaaaaataaagaattaaattcactggaatgtagtggtcaatatatagaaaaaagcattataaaaaatggtgaaaatatagttgtagatataggaattgaaaattcgaaattaaaggaattatatccacaaaattataatatttcaacaggttttctaacatgggaaaatctttctgactttccaaatagcataagttatagtttggaatatgaatatggtccagtaaatgatacagagactatggatgtaaatatatcaatagataaattagtgaaatgtagaatcagatatatagattatgatggaagtataattaatgaaaaagaaatatcagataattctagtataaatgaaattcaaattaatcctcaaagagaaaactatgagtttagtggttggaggaacaataaagatgaaaaaatatatacatcagagcaggtaagtaaattagtttttgatgatagtactgattttatagcaacttataaaagaaaatcaacaggatcaagtggttcttctggtggaacttcaagtaaagaagattttaatatagcaccatctaaggaaaaaataacaggtgcagacagaaatgaaacatcagtgaaaataagtcaaaaaggatggaataaagctgataatatagtgttaataaatgactctagcatatcggatgctttatcagcaacaccatttgctaagtctaaagatgcaccaatattacttactaaaaataataatttaaataaattaacagaaaaagaaataaatagattagaagcaaaaaatgtgtacatagtgggtggattaaagtctgttgatgaaaaagtagtgtctgatttaaagaaaaaaggattaaatgtaattagaatatctggaaatgatagatatgaaacatcaataaaacttgcaaaagaattagacaaaaattctaacctgtcaaaagtagtagtggtaaatggagaaaagggactagctgatgcagtaagtatgggagctatatcagcaaaagaggaaatgccaattcttcttactaatcaaaatgatgatatgaaagatataaaagacttaatagctaataaaaacatatcaaaatcatatgtaataggtggagaatctttatttaataataaagaagtgaataatacattaccatctgtaactaaaatagcaggttctgatagaacagaaactaactcaaaagtaataagtcatttctatagcaaagatacacttaatgacttatatgtagctaagaatggaatgaataaacaagacgatttagtagatgccttatcagtaggagtgcttgcaggtaaaactgaatctccagtagtattagttggaaatggattagatgatagccaaaaagagttaatcaagaataaaaagtttaaaaatataactcaaattggtggaaatggaaatgaaaaagcatttaatgaagtagaaaacttagttaaatagattgaaaggtagtaactggaaatagttactacctccttttttattcattttcagttttttcaataattatttttccatcctcaaaagtaacaagaacatccctttcatcaggagagatattcatctctttaatccatgacattggaagtatcaatctgggtgtaaaagagcctttgccacttttattaaatccaattctaagttttctttgctccaataatatcattcctttctactattaataaatgccagcaataataaagtaaataccaaagcaataagagctttaaaagtaaaacttattattatattaataatatttaaaactatagtgataccaagaataatcatacaaattctataaaatttattattcatattaaattagaaaatgtgttataatattagaaagaagctacctagaaggaaggtattttcctcctaggattgaaacttataattctttaatcaatcttagtattgcgagtactagattaattaaaactaatgtgaaagagaaagcatttttaattttattaaatttgttttctcttttattttttcttctttctaatctccccactttcttacctcctttctatatttatattatatcatcacgtgacgtgaaagtcaataaatattacatatttttcaataaagttatattgataaactatattttttacaaataaaaataaatggtgacaaaaccaaacttgccaccattttgccaccgaaaataaataatagaataaatttaaattaaacataataaaacataaacaacaaaactgaccttaataaaacattgaaataccaacacttgtaaaaaataacaacaataaacaaataacctagaataatattacaacttaagtaaataataattttgaataataatttacggaggtattcatatgtttaaacacgataaagcattattaaaagaagtaaaagtagaaagaccaaatcctcaatatgctgttttaatgcaagaacagttgggtggtgcaaatggagagttaaaagcagctatgcaatacttgtcccaaagttttagaataaaagaccctcaaataaaagatttatttcttgatatagcagcagaagagcttagccatatggaaatggtagcacaaactataaatttattaaatggacatgatgttgattataatgcagttaatacaggcgaaatagaaacacatgtattaactggtctatcaccagtcttaataaactcatcaggagctccttggactgctaattatgttacagttacaggggatttagtagctgacttactttcaaatatagcttctgaacaaagagctaaggtagtttatgagtacttgtatagacaaatagatgataaatatgtaaaagaaacaatagatttcttacttaacagagaagaagcacataatgctctatttagagatgctttaaataaagttaaagatacaggttcaaatagagattttggagttacagaagattctagattatatttcgatttgtctactccagggccaaatcacaatactaagatagatattaatcctccttcttttgaaaaacctttaaaaaaataatttgatattttttatgttgttttgttttagtagttataaaaattatttactagaagaattaattatatgaaaaattaaatatgtatagttaaaaatgggtatacacttattataagtgtatatctatttgtttattgcaaaacatataataaaataacaaatgaggtggtattttggacagtaatagaaaacctaataatctaataaatgaaaaatctccatatcttttacagcatgcttataatcctataaactggtatagttggaatgatgaggcttttaaaaaagcaaaagaagaggataaaccaatatttttaagtgtaggatattcaacatgtcattggtgtcatgttatggaaaaagaatcttttgaagatgaagaagttgctgaaataatgaatagaaactttgtggcaataaaagtagataaagaggaaagacctgatgtagatagcgtgtatatgacagtttgccaagctatgacaggtagtggtggatggccaatgaccataataatgacaccagataaaaaacctttttttgcgggaacatatttcccaaaatattcaaggtataatagacctggagttatagatttattaaagaatgtatctgaaaaatggaatacaagtagggatatattaataaaatctggagatgaaataatagaagctcttaaggatgattttggtgtaaaaaatactgagggtgatttatcaaaagagatgttgagttcatcagttagagtatttaaggccatttatgatgaaaagtatggtggttttggtaatgctcctaaatttccaagtcctcagaatcttatgtttttaatgaaatattatagcatagaaaaagataaagatgtgttaaaaatggtggaaaaaactttagatggaatgtatagaggaggcttgtttgatcatattggatttgggttttcaagatactctactgataaaaagtggttggctcctcattttgaaaaaatgctatatgataatgctatgcttactatagcttttttagatgcatataaaataacaaagaaagagttatataaagaaattgctataaaaactatagattatgtagttagagagatgaaggataaagaaggtgggttttattcagcacaggatgctgatagtgaaggtgaagaaggtaaattttatacatttaatcctcttgagataattgaagttttgggtgaagaagatggaactttctttaataattattttgatataactagtagtggaaattttgaaggtaaaagtattcctaatcttataaaaaataaagaatatgaaagacataatgaaaagatagctgaccttagtaaaaaggtatttgaatatagaaaagaaagaacatctttgcataaagatgacaagatacttacatcatggaatgcattgatgatagttgctttaacaaaggcatatagtactttaaaaaatgacatatatttagagtattcaaataagtgtcttaactttataaataataatcttgtaaatgagtcaggtagattattagctagatatagagatggaagttccgactatttagcatatttagatgattatgcttttttaatctgggcgtatatagagctttatgagtcaacatttaatatgaaatatttagaaaaggctttaaatttgaatgaaagctgtatcaaccttttttgggattatgaaaaaagtggattttatatatatggtaaagatagtgaaaatttaatagcaagaccaaaagatttgtatgatggagctattccatcaggaaattctgttcaattatacaatcttataagacttgcgaaaattactggagataatagacttgaagaaatgtcatataaacaattaaaactgtatgtggataatgtaaagagttctccaactggctacagcttttatatgctttcattgatgtttgaactttattctactaaggaaattatatgtatttttaaggaagattctgatttaattgcatttaaagaattgataagtgaaaattttataccaaatgcaacttttttagcaaagaaatacaatgaagaaaacactattataggttttttaaataactatagattgaaggatgataagactagttattacgtgtgtcaaagtaatagttgtagtcaaccaattaatgatttacaaaaattaaaagatatgattttaggagtagaataatcataatagcgaaaaaggagatgctttaaaataaaagtctaatcatctcctttttttgtacaaaaaacagaaaaagagttcctaagaacacctaatctatgtaatgattgttttgttaaaaaataaaaatgacattatagttatataaaatattgtactataaaaaagtggtattatagatgcgatagtattaatcgtttttatttaccctatttcttctttttgcaaattcttcaagtgcttcagatttaattttatctatttcttcatattccataaaattagcatcttcttcaaagccatcttgttcttcaccattaaaacgatacattttttttagtaaactccataaggtctctaattcatctttggtaaattcgtgaaatacatctgccataaagtttattccagtcctactacatgttaccataaccttttttcctaagtctgtaactttaacattaattgctctcttatcatgaggacttggaattacatcaacatatccatttttttcaagattagcaactagtctatttatattttgtttacttgtacccatttttcttgcaatattatttaatgttgtttcttcctctggtaaatgaagaattgataaaatagtcatatactgtcttgaagtaagtataccaaaatatttatctccttctatttgtattttgtttgtaagggtaaaaagagttgcatatgtttgattcattaaaaagagctcttttagttcatttgaataatccatgaaatatatctcctttatttttagaagttgttttgtcgaaaacagaatatcatgaattaattctaatgtcaatatggtgtcaaaatatattaaagtattacttttttatgtaactattaattaaattattgtataattgtatgtaaaaacttctatgtaccaatgataatttctatgaggaattaataattcttaaattttttagaaagattttgacttgaaaatacttgtaatataatatataaattaatatactgaataaaatcaatctggagggataattatgaagtgtacaaactttactttcaaaggagaggaaggtttagatatatatacatataaatgggaagatgaaaatataaaaaaaccaaaggcagttatccaaattgcacatggaatggctgaaactgcacaaaggtatgagacttttgccaaggtacttactaaaaatggttatatagtatatatcaatgaccatagaggtcatggaaaaactgcaaagataatagaaaatgttggacatttagctgaaaaagaaggatttagatgtcttgtagaggacatgtatactttaacaaatattataaagaaagaaaatgaagatttgccaatttatctatttggacacagcatgggttcatttgcaagtcaaagatatataatggattacagtaataatttatctggtcttatactatgtggttcaaatggaaagcaaggaatcattctaaatcttgctcatctgataatcaatcgtgagattaaaaagtatggaagacgttctaaaagtaataaaataaataatttgattaaaaaatagctatgcacacttgtgactttagtcatgagttagtagctaaaatagtcagcatatagggaaacctatatgtagagataggatagaacctatccaatactacttgaattgctggaaacctctaaagctaaccaaactaaaacataaggatgaaataaacctaagtgtgaaagttacgaaagtagaaaaaattggttagatggtataaggttaaaccctaagtactttaaaatgggcaatcagcaggtaagctccgaataggagaaacttcaacgactattcctcttgagggaagtacactacaagttattggtagtggaagtgggtagaccttagcggataatgccgaaggataagatatagtctgtgcttacatgaaagtgtaagaagttcataagagaactgcataggtagtagcgaacttatgtgaacgacaacctcaaaaatgataaaagttaagaacttacggttcttatatatgttatttaaaaataaatataaaaaaccttcaaaatacttgttttaagtaattgcatattttaatattatgataggtgatgaaaaatggaagttactcatggtagaggatatgcatataatatgtcaaatatagacatccagtattatggggagacatctttggaatcatagttatttcgttgctactgtatcagaaaatacagaggagcagataagaaaatatattaataatcagaaaaaacaagtaaagtgaggtggcagtagtggaaaaagcttataagtttagaatgtatccaaataaaaaacaacaagagttaattaacaaaacttttggatgttgtagatttgtatataataagtatcttgctaaaagaatagaagtttataaaaacgataaagaaacttttacttataaacagtgtagttctgatttgaccaatttaaaaaaagaattaaagtggcttaaagaacctgacaaattttcactacaaaacgccttaaaagatttagaaaacgcatatgaaaaattctttaaaaaaaggcacgatttcctaaatttaaatcaaagaaaactaatagattttcatataaaactaactttacaaatggaaacattatgtattgtggtcaacatataaaactacctaaacttggtatggttaagataagggataaacaagtacctcaagggagaatacttaatgctactatatctaaagaaccaagtggtagatattatgtatcattatgctgtactgatgtagatattgaagcatttgaaaatactaataatcatataggtttagatttaggaattaaagaattttgtatctcaagttgtggagaatttatagaaaatcctaagtatcttaagaagtcattgaacaaacttgctaaattacaaagagaattatcgagaaaaacaatcggtagtttaaatagaaataaagcaagattaaaagttgcaagacttcaagaacatatagctaatcaaagaaatgattttctacaaaaactatctactaaattaataaaagagaacgatattatttgcatagaagatttacaagtaaagaatatgattagaaatcgtaaactatctcgcttaatttctgatgtgtcatggtcagagtttattcgtcaattagaatacaaggctaattggcatggtagacaaattgtaaaggtaggtaaattctttgcaagttcacaaatatgcaataaatgtgggtataaaaacgaggaagtgaaggacttaaatataagagaatggatttgtcctagttgtaatgaaattcacgatagagatataaatgcaagtataaatatattaaaagagggattaagactaataacaattcaaaataaataacttatgtaagaaccgtaggaactacggggatagcctgtggagaattagtaagacatattttagtatgcaaaattctgtgaagcaggaaccctgtgactttagtcatgggaggttcagatttggtggcaaaataataagaagaaatgaaaagactaagtttgactggttaagtagagataaagaacaagttgaaaaatatataaatgacccattttgtggagtagtgtgtagttgtggctttttttatgatttagttcaagggttaaaagaaattgaggataaagaaaacttaaaaaaagtgccacttgatatacctatttacataatatctggagataaagaccccataggaaaaaatggtaaaggagtcttaagactaagggatagatatataaaattaggagtaaaagatgtaacttgcaaactttacaaagatggaaggcatgaattgttgaatgaaataaatagagaagaagtttttgaggatataatttgttggttaaacaataaaatagaaatattgtaataaaaaaatataatgatatatttgctttaaatttatttatatataatatttgaaaagtggattatgtatatgcaaagtagaaaagagagagcctagaagtgattttttgctataatgccatttattgaataggtgggtgttattataaataaattattaacactcagtattattatcattgtatatggaatttattttatttaaaattccttgaaagtttaaatatagtaagttgtagtaaagagaaaatctaaatatttaaatgctatttaatgtgaatctattaattaggttatacttaaacttaattaatagattttatatttcaagccaatgagatagggttttagattaaaatataaccaatggttaaattacagacattttgttaactttccctcgatttactagtaaatattttttttatatacttaaattacaacagatgtactagggaggtatatatgcaaattaaaataggtaaagtcatacagcgtcttagaaaagaacgaaatttaactcaagaacaattagcaaagtttataggtgtgtcaacaccagcagtatctaagtgggagagtggaaattcttacccagatatagaattattgcctttattagcagacttttttaatgtgtctattgataagcttttaaattacaagattgatttaagtgaagaaaaagtaatgaaaatttataaagaattagaatcaggctttgctagaattgaaattgatttatcaacagaagaaccaaaagaagaatttagacaagacttagaatctgtaaaaaagctttctaatatgtatatagagaagtatcctaaaagctatttattgaagctaaggatatgttcgctgtatcagatgtattcatataaatttggtaagagtgaacttaatgacagagtaaaagaaacaacgaatattcttgaagatatagtgagaaatacagatgatatccaaataaaagaaacagctcttattatattatcaaacgcatattgtatgttggaagattatgaaaaggcagagttgtatttaaatatgatacataagtcaataggggatacaagtgttaatttagctatgatatatttaaagcaaaatagacttgaagaagcagaaatattgcttcaaaataaattgtttagtaatatatttaatataagcatggattgtaagggaataattaatgtatacaaaaatcaatacaaggaattaaagaaaaaattggagaatagaaattttaataaaaatgcaattgagagagaaatggagtatataaaaaataagttgctgtggtatgcaaatctttctttagaaataaaaaaaatgctcagtgaagataaaggtgcattttttagtatgtatgtggattatatggaattatctctaatttttttattttttaacatgaaagaagaagcaaaaaaagccttatatagtctaaaagaaatattagaaaaatatcctatacatgaaagtttggatgtaagtcaaatgagattttttgataaggtagagtctaaaaatttatatacttttaatatatatacaaacttgttaattgtacttaatgatgacagttataatgagcttagagaagaaccaatttttaaggatgtaattgaaaagattttagatatggaaaaaatgttgaaaaataaagaataagtaaaaatttaatataggacttaaagattaatcaaattaaaagaaagtgtttcaaaataaaaatttgaatcaccttttttgttggtcttaaaccgttatttagaaaaatagaggtttcaaaatagaaatctgaattatctgtattattacacaaaaatagaaacctaaatttataaaaatagaataaagtttgttatataaaatgtaattttgtctataaaatctcacatgttttcttaactttaagcgtgaaaaagaggatgtatcatgaattttttagttcatgatgcatccttatttgtatgaaatccaatatatctttattatttaaacaatggaaaagagtcttatttctattttgagacatctcttttatttaattatgaagttttatacagttcaataaataggaattatatttagaaactcatgacattatttcttagatagtgattaaatttatcatattccattttagataacttttctgggtaagacattacaatcaggttatgcccattgaatttttcatggtatggtggatgaatgtgttcataattatttgtcttatattttactctttcatagaacgccttgcgataaattgaaatctcatcaattggaaggtcaatttctaaaataatagtttttcctttcttatttaaaagctctaacgctctttgtccatatctattattgcgcatttctggaaaaatgcagaaatgttctacatagataaagttatctgtttcccaacataaaattatgccgacaaactggtttttatcataaattaaattgaattgatattctttatttttcaaaatttctgtttgcaaataagattttctttgttcatgaaatgggaaactaattttatataattccatagccttgtaatataatttattttcactggttcttaaccgttcaaatttcactttactcctcctaatcacgaaaattccaatttatttatgagttcattttaccatagtcagtatttgcatacaatgtgttttaagttgagtgtcatttctttcttttatttatgcttatatctcatagactaagagataattgcttaagacataactaaaaactattatattaagctttgataatctaaaaacagtatatttatggacttttctaggtctaaaagtaatcttaataattttagaagttacaaaaaagttacataaatttggaaagctataatatacatatataatataaggttaaaactgtaatgaataatattaatttaaaatttgaacatggaaggagattattatggagaaaagagaaaagaggataataatatcatctttattaagtgtatcaattttaatgggtttggtaagtatatattctatattaaataaagaagacataattttaactgttaagggtcaagagcaaaaagtatcttcctttaagaaaacagttgaggaacttttggatgaacagggtgtaaagtataattctgaagataagattaatccaagtttagatacagaactaaaagatgatatgaaaataaaagttgttaaggtaactaaaagtaaaaaagaagagattgaaaaaattccatttgatacaaagcatgtaaatgatagtaatttgttaaaaggaaaatctaaagtttatcaagaaggtcaagaaggagaaaaaaaactagtctataatttaacttaccatgatggaaaattagtcaaaaaagtcttatcaaaagaagtaatatctaaggagccaactacaaaaattataaaatatggaactaaagaaaaagtactaatagcatcaagaggagcaaatataagaggaggcaaacatatgaaagtggttgccactgcatatgcaggagatacaataacatctactggtacaactccaagatggggtgttattgcagttgacccacgtgtaataccatatggaacaaaagtatatatacctaaactgggtatgacttttgtagcagaagattgtggaggtgcaattaaaggtaatagaatagacatttttatgaacagtgaaggaaaagcttcaaattggggaaggaaaagtatagatatatatctacattaaattagtgaatagaataactttacttgaaggacaaaaaagtataaaatatgaattaactaaactgttagattattcttaaaacataaaaatatatctaaggggggataagatgaaaatagtctgcttaggagacagtttaacgtatggatttggagtatcacgaagtaattcatggacaaacattgtaaatgaagagactcgattagaaatagtaaataagggtataaatggtgatacaacaagtggtatgttagctaggtttaatgaagatgttgtaaaaaactctcctgatatagtttttataatgggtggcactaatgattttattgctggtgcgggaaatgaaattattaattctaatataatggctatggtgcatcagtcatattcaaaaaatattatacctataataggtataccattaaaaccagatattccaaatgttagggaagattggagttgttttactgattttaatatagtatctcaaaacttagaatcatatagttattggataaaaaaattttgtatgacatttaatactaatttcgcagatttttattcagaatataataaaaatatggaactagaaggatataaaaaattatattttgatgggttacatccaaccaaagagggtcatagaataatggcagacatttttattaattcaattaataagtatatagaagagttatagattacattaaaatgcttgtttatgcgtcagttgcaataaatacatacagtagagaggggtttattatggattatactaaaacttatgaagagtggataaagggttcatattttgatgaagatacaaagctagagttggagaatataaaaaataatgaaaaagaaatagaggatagattctataaggatttagaatttgggactgcgggtcttagaggaataattgaagcaggaacgaatagaataaataagtacacagttagaagagctacttttggattggcaaactatatattagaaaacacaacaaaagaagaaacaagtagaggagtagtaatagctcatgataatagacacaagtctagacaattctgtatagaatctgcaaatactttggcagcatgtggtataaaagcatatatatttgatagtttgagaactactccagaattatcttttgctgttagaagcttaaatgcaatcgctggtatagtcataacagcaagccataatcctccagaatataatggatataaggtatactgggaagatggagcacaagttatgccagagattgcaaatgcaataacagagaaagtaaatagtatacatgattatagtacaataccaaccttaacggaagctaataaaaatttggtagttttgttggacgaatcacaagatactaaatttatagaagcagtaaaaagccaaattataagaaaagatttagttaaaaatgtaggtaaaagctttaagatagtttatacacctctttgtggaacagggaatgttccaataagaagagcattgaaagaagttggttttgaaaatataattgtagttccagaagaagaaaatccagacccaaattttgcagggcttgattatccaaatccagaagagaaaaaagctttaaatagaggtatattactcgcaaaagaaaaaggagcagaccttgtaatagcaactgacccagattgtgatagagtaggtgtagcagtaaaaactactacaggtgagtatgctttacttacaggaaatcaaattggtggtatgctgacacattatataatagaaggattaaaagaaaataacaaattaaaagaaaatcctacaataataaaaaccatagttacatcagaatttggagcagatatagctaaagcaaataatgttgatgtattaaatgttcttacaggttttaaatttattggtgaaaaaataaaattatttgaacaaaataaaaatagaagttatgtatttggatatgaagaaagttatggttacttagttgggactcatgctagagataaagatggtgtagtttcttcattgttaatatctgaaatggcagcattttactattcaaaaggtataagtttatatgatggtttaatagaactttataaaaagtatggatttttcaaagaacagactatatctttgactttaaaaggtatagaaggtgtagaaaagataaaagaaataatatcttattttagagaaaatcaaattgattatataaatagtattaaagtagttgataaaaaagattataaaaatggtatagataatcttcctaaatctaatgttttaaaatactttttggaagatgaatcttgggtagctataagaccatctggaacagaaccaaaacttaaattttacatagctgtaaaaggagctagtgatattgaagcagataaaaagattcaaggtttgaaaaagtatatagatgacatggtcgaaaaattaaaataaaatattattattttataagataattttgtaataatatttatttagctgaaaattataatttactttcattgagtagaatatggaaatgttagtagaattgttattttcagcttttatttgtgttatttttacttaaataattatattatagaatgaatctgagtataattaatattgtataatgaaattaatttgatagaaaaggggatatttatgtttggtatagataagaaattgattgaatatataattgcaaaatccaattacagtgaattaagttcaaagtcagcagaagtatctttcttcttaatgttgtccatatttccttttttaatatttacaataagttctatagcttatataccgattcttcatttaaataagtatatagctttgtttagaaatatgatgccagaaggtgcttttgctgtgttatcttcaatcatagtttctgcaatagacaatagaaacctgaaatttttagcagtcagttttgtacttactatgtggacattttcaagagcagtaaaagctcttattaaaggaatgaatagagcctataaagttaaagaaactaggtctttttttaaaattttatctatatcatttttatttacaataatgcttttggtccttatttttttatctatgatatttttagtttacggggaaaaaataggttattttatttttaatcttgtaggattggatgagatatttataaaaatatgggatattctaagatacactgtaggtataataacaataatagtgatatttacacttttatataaatacactccaaataaaaagttaactattaaagaatctgcgccaggtgctatttttgctacttttgcttggtttttagtatcatttttatattcttattatacaaattactatgctaactatgaagtaatctatggaagtatagctgaaataattgtacttatgacctggatgtattttagtagttggtctatcgttattggctatgaggtaaattcaagattgtattttagaaagataagacatgaaatgttaaagtaaagtatttaaaataaaagagagtatttagtattataaatgtaattgaattaataaagaaatattgacatttaagttaaaaagtctagaatttttctgggctttttttatttttagtataacttgacaaattttatttaatgggatagttttaatttataatcatctttgaaaagatgactattgataagtaaggtataaaattggtaagtatcaaaaaatatactaaataaaaattatagtcctaatgagttaatttctgtattttcaaataatgcagtatttagtcatgtgtttttatatgcgcctgtatttccaattaccaatatattagaataagctactgtaattagatttagaaaaaagcgacataaataattataaacaaataataaattacataaaattaaatttattcacaagtatatcttataaaatatgttataattaatagaaaattgtcatataattaattaagtagtattattataaataacattgaaaggtagtggttagaatatggatatccataataaatatgtaaattttataaaaaatatacctgtaccttttttatattgtagaattgtaaagagacaagaagatatagaatatcgagtagaatatataagtaagggtatgggcaaagtattacaattagaagaaggtatttgtgataaaaatatactagatgtattgcctgtatttaagtctaaaaaatatttcaaagagttgttctcaaatgaagtggattgtataaaaaggtacattccgacacttaaaaactggataaatataaaaaaacagataataggggattcatacataattttgtattttggtaaaattgtatttgattatagacagataatcgattcctttgataaaaaggaaaaagtagcttatattaaagacgaagaaggcatatatatagattgcagtgaaaatttaataccaatattaaataacaacattaaaacaacgaaagatatctttggtaaaaatgatatagaagtatggggagagaatacaggaaaattatttagagatgattatagaggaggagtatctagtaaaaaaagatttttacaaaatctttttgaatatgaagaaacattttttatggttgaaaaatattttttgtatgatgaagacgaacttttaggtactatagggataatagataatataatatatagtggttacagtaatagaaattataactcaaaagatttaatgaagatgatagaacactcaattccagagaatatgttttataaagatgtgtatggaaattatattggatttaattcaggttttttgaatttagcttgtatgaataaagaagaattattagggaagaatagttataaaatatcagaagaagaagctttaataaataagatatttgaaagtgataagggtgtagttgaaaataaaaaagtagttacatttgagttaaatgtaagtataaatgatgaaaataagtgtattgagattacaaaaaggccgttttttgatagctatggaagtgttattggaataattggaacagcaagggatataagtagaagaaaaagattagaagaggaaatggataaaactaggatggaattttttgcaaatttatcccatgaacttagaacgcctataaatttaatatcatcttcattacaagtgatagaaaaaaaagaagcagatttaatagaatcaaatgatactttaaaaagaaatttaggtataataaaacaaaatggaaatagaatactgaggttagtaaataatgttatagactttacaaaaatgcaatcaggatatttagattttaaaccagaagaatctgatataattgcatttatagaggagatatgtatgtctgtagctgattttgcaagccaaaataatatacaacttacatttgatacagaaatagaagaattttcaatgttatttgattcagaaaaattggaaagaataatattaaatttactttctaatggaattaagtacaataagaaagatggaaaaataaatatatttttatatgtgaaagataatgtatttaatatgaaaatatctgatagtggaataggtataccaaaagaaaaaatagataaaatatttaatagatttgaacagattgacaatgaactttcctacagagttaaaggaagtggtattggactttcattagtgaaatctttggttgaattgcatgagggaagtatatctttaaaaagtcaacttggtattggaagtgaatttatagtttcattacctgttagaagtgaaaataatattgaaaaatataatcataaaagagaaatcagcaatgaactaagtaaaaaattagaaatagagttttcggatttataagtttaaatataaaaaataaaattttaaaaaagtattgacaattgatttagaagggtttaaaataaattacaacataataaataaaaaggcgatgaataggaagagtaaatctaattcgattaccagagagaagagtccattggctggaagactttttaaattagagggattgaaaactacctaggagctactttctgaagtcatctgcattagtagattttagtaagaatagtcgttagctgcgttaaagtgtaaagtgagttttcatgatatatgaaaactaaattaggtggaaccgcgggaataatactctcgtccttatgttataaggatgagagttttttgttgtttaaaaatataaacagtaatcataataattatagaaaatataaaagcgatgaataggaagagtaaatttaattcgactatcagagaggaaagttcacaggctgaaagactttctaagtttgagaaattgaaaactacctaggagctgtggtctgaagttactttaaaaagttttagtaagactaaccgttaactgcgttaaagtgtaaagtggattttatcaataaatgataaaatcaaattgggtggaaccgcgagtatagactcgtccctttatatagggatgagtctatttttattgcaataaaagattgaaaataaaaaaaaatcggaaaattataaatttaggaggaaaataaaatggaaaataaagtgaaaattggagtactaggatatggagttgtaggaagtggacttatagatataatagataataataaagaaaaaagaagtatagaaatagttggaattttagttaataatttggaaaaacataaggataaaaaatattctaatataataactaataatatagatgatatatttaataaagatatagatatacttgttgaagtcatgggtggtttagaaccatcattatcttatataaaaaaagcattaaacaataaaattcatgttgttacagcaaataaagatttgttagctgaatgtggagatgagcttgcaaaattagcaagtgaaaataaagtaagtattaaatttgaagcttcagtcgcaggaggtattccagtattaaaaccaataatagaatcactagaaggaaataatatagatagtataaatgcaattttaaatggaactactaattttatattatctaaaatgtatgatgagaatctatcttatgatatggcattaagacaagctcaagaattaggttttgctgaagcaaatccagagtcagatgtattagggtatgatgctgctagaaaactatcaatattatcaactctagcttatgacaatagagtatattggaaggatgtgtatttagaaggaattacagatatagatgaaaaagatattgaatatgcaaaaaaattaaattgtaaaataaaattgattggtcaaagtaagtatgaaaatgataaagtaagtgcttttgttagacctgttttagtagaaaaagataatatccttgctagaatagacaatgagttcaatgctgtcatagtgaatggagattcagtaggagaagtttcttttgtaggtaaaggagctggaagtttagcaacaggaagtgcggtttattcagatgttatagatataatagataatagagtttcaagtatagattcttttactaaagataaaatacaagttaataaaatagttagagaaaagtgtggagcacttcttagatttaaaaaatgtaataaagatgaaattctaaatatagttgagaattgtttagtaaaattcgatattttaaatgatgatgatgaacttgctattatggtttatgctgattctgaatatgaaataaacaacagtttatgtctaataaaagataaaggatattgcgaaaaaatgaataaaatgttgaaaataagttaaaaaagaaaaaataagtttatatgtaacatattttgacgattttaatactatatagtatgagatgaaacaaaacatctcataaaaaattaaaattcaagggagagatatgttatatggaaaataaaaaatatgcaaatggtggttattcagaagactggtatgaaagaggagaatctacagctaaatggttccagaatgatagagaagaatatgaaagagcagcatacgatgaagatagagaaagaagaggctcaaactgtggatgttcagattcaggaggaaatagacctagaaactgtgaaagatttagaagagaagctgagataagagaaagagaagcaagagaagcattctgtgaatcttcagagagaaagaaagaagcactagcatatgaatgtgaagctagaaaattatgggaagaagcagaaaaatactgggatgaatattcaaaatacaactataaaggaatcgaatatttagcagaagctgctagattatttgatgaaggtatggaatgtgaagctagaagaaatggaaataatggaggaaacaataataattgttgccataaatgccataaatgtaattgtaactgctgtagaaaataaaaaaattcattgacaaatcaatagttaaaatatatcatattatgtataataaagagaaaattcagaaaaaaataatgattagaataaatttaagtatatttattagacaaatagtgctcagttagtgaggtgagtacaatatgattaaactcccatcctctagcttttgatagagggtgggagtttttatttattgatatatcttaaatgaggataatattgtaaaataaatgagtatgagattgtaaaattaggaggtaaaaaatgaaaagtattaaaacatcaagtatgaaagaaaaggtagatgaaaagatattaagagagcaagtaagttctataatagaagatataagaaataataaggatgttgcacttaaaaaatataatgagaagtttgatagaaatacaagagatgaatttagaattactaaggaagaaataaaggaagcttataagcatgtagatgacgaatttataaataacttaaagattgctgccaaaaatataagagaatttgctaaagctcaaaaactaagttttgaaaacccttttgaaaaagaaatttatccaggtgtaatcttaggtcaaactaatattccaatagagtcatgtcttgcatatgttccaggaggtcagtatccattgttttcaacagctcttatgcttataatacctgcaaaagtagcaggagtaaaaagaatagtggcatgttcaccaactatgaaaaatactgaaaagataaatcctaaaacattggtagctatggatatagcaggtgctgatgaaatatatgcaactggaggagttcaagctatagcagcatttacatatggaacagaaaagattaatccagttgacataattgtaggaccaggaaataagtttgtaactgaagctaaaagacaatgttatggacaagtaggaattgattttgtcgctgggccaagtgaagttcttataatagcggatgaaacttcaaatccagtttatattgcagctgatttattagcacaatgtgagcatgatttaaatgcaagaggaatattattgacaaatagcttggaagtagcacaaaaagttgaaaaaaatatagaaagtatgctaaaagatttgccaacaaaggacatagcatatagttcatgggaaaataatggagagataatattggttgatgatatggaagaagccattaaaataagtaatttttatgcaccagaacatttagaagttgcagtaaatgagtataatgatatttgtgatagattaactaactatggttctttatttattggaaatctttctgctgaggtgtttggtgactatgtttcaggtaccaatcatacattaccaacacttaaagcatcaagatatactggtggtgtttgggttggaacttttatcaaaacttgtacaaagcagatatttaatgaaaaagctatacaatcattagcacctgtagctgaaaagctggcaaaagaagagggattatatgcacatgcaaaggctgctgaggttaggtttaaaaagtagtaaaaaattttattttggcagtcgagatttagtattagactgagataaagaaaacgctgagaacctgaataaatactatattttgtgggcctcggcgtttcttttatatctgtatataataggataatactacctgtgtgtttaaatgctaacttaatatttcttttctaaataatgtttatgaaatagttaatatttttagttaatacttgaaaaaaacttttgctaactgtgcaaattcatctgcatttgtcaatatagcagggtgtcctccctgactaaaaatgtgaatacttgcttttgaaataaaagttgccatttgcttgtactcttcttcaagattatgacgacacatttcgtcttccttacttcctgtaaataaaattggcatttctaatttacacaattctttatgaaataaagggcgtttcttgtttgcacattgcaatagagcttttgtatcaagattaacaacattctcccaatcttttccatgacaccattcatagaattttcgtgcttgaatatcttgctttgatttttcccttccagtgattagattatctatgaagttatcattaagagtacgtccatcaaagctatctgctataattgcttcaactaaatcgggacgttctaatccagtattaacagctgcccatgctcctccacttgttccaattaagccaactttaccacaattcaaatgttcaatcagtgctattgtctgtaaggcttcatcatgccatatgtcaggagaaaattgagaaactctatcagactgtccattacctaaaaaatcaattaagatacatctaaaattttctacatataatggcacaagtgctttaaacatattagaagaaccagtattaccatgcaggaaaattatcggtttaccttgtccatattctttataaaaacaagaattaccttgatactgaaaatatgacatatattttcctcctttttatttgttaagttaattataacaatataggtatgaatgaaaaacctcatgttctttcttagaataaaaatgtgccacgcataaaacgtgacacatttctaattataaattttgctgtttaagtattctttgtatgcttttctctgtcaaaaagtatttctctgataactgcttgatactcattccattttggaaatttatacagatttgagaattacgagaagctaagacttgtttggtgtttgtgttttcaccccaatgctttttgtgctcttgctttttgggaatataaatcactttaccatctatatattcttgcacttgctcaatcagttctttaggcagtaagtcaatcgaattttgatagctcattttgcacctcctaaataattactctttaggattagcaaaggctactgctactcacaattaaaaataaaattttttattatgtacaatagcctttgctatgcacaagttccaattcccataaactaaatactcctttctggtttgaaaaattcatctgaacattgatttcgattttaagatagagttcaatgacaaatttacatttttattatatatattcagatagataattgcaactgtctttgtatgaggatattttattatagtcaatactataatatatatttatatcatcaaactaatatgaacagttgaaaggaatatgaacaataaaacttagtcaggaagaataattatgaagcagacaattgagaaatttgattttaaagttttattgaaaatttattgacaaatttaacttgtaaatattatactaaacttaataaataaagtttataaagtaaggtgttgtctatgaaaaatatagttggaaaaccgcaaacgataaaaaaagtaaatgaagatttaataaaaaacattataaaaaatgaaggtcctataacaaaaccagaaatttcaagcattactgaattgagtttagctacagttaataagattgtggagcaattagctttgaaaaatgaagttaaagtaagtggactaagtgaatctactggaggaagaagagctcaattatttgaaataaatgcaaacttagaacacataatagctttatattattatagaaattgttgtataggggtagttgccaatttattaggtgaaataatttatcaagaagaatttaatataagaatggatacatatgaaaacgttaaccaagatactttttttgttatagatactctaataaaaaaggaaaaaggaaacaatataagggctattggaattggtgtcccaggagttgtaaaaaaaggtgtagttaaaaatataccaactataaaaagttgggaaggtataaatttagaaaatttaataaagagtaagtacaatactaaagtgtttatagaaaatgatacaaatattactactattgggatttatcaaaaacagtataaagacaaatataaaaatatggctcttatgtatttagaagatggtattggttcaggtatagttataaatggtgaattgtatttaggttctacaaattttgctggagaattaagttatctaaatatagaatttggtaagtataactctaacaacttaaatcttgaagattatattatgagtttaagaaaaagatatttagaaagtaaagataataaatttaagaaagaaattttatctataatatcaaactttataaggactcttgtatgtgtcctaaatccacaagctatgattatacagtgtagtatattaaccaagagtgacatggagtttatagaaaaagatgtaagtaataatgttggagaagaaaattttcctaaattaataaaagtagagtcattgagagaaagaagtataaatggagtaattagtatgtgtttaaaagaaactgactatcaatattccttatctaataaaaaaggaggatattaatgtgaaatatttggtttcaatagatggagggggaacaaaaactaaattttgtgtaagtgacttagatggaaacatacttaaagaacataccactggttcaactaattataagtcagttggaattaaaaaaacatatgaaaatattaataatggacttaaaaaaatattaaaagatttatatatcgattatgacgatattgagtacactgtatttggtatatctggttgtgattctcctaatgattataagattataatggatgaaatattaaaaattgggattaacaaagaaaaaatatatctggcaaatgatgcagttttagctttttatgcacaagctgattcccctggtttagtaattgtggctgggacaggttcaattatactgggaattaaagaagatggagaaatatatagagttggtggatgggggtataattttagtgatttgggttctggatatgatatagggagaaaattattaaagaaagtattgctttattgtgatgaatgtcatgagtatagtgatttatttagttgtgtcttggatttctttggagcaaatagttttgaacaacttgcatatatgattactgatataaacaataatgttgaaatagcaaacctagcttcattagtgattgattgtgccgaacaaggtgataaattagctattgaaatattaagagaatcatcaactgaactatctaaattagctcaagtaatattgagaaaaatatctaatccaatgaaaatagataaaagcgaaataaatatagttttgtctggtggtacattaaataaaactgtatatgctcaaatgttaatgaataatttaaaaacagaaaatacagataaaaatttaaaatttatatctcaagaaaatcagccagtatatggggggataagacttgctatggcattagctaataggagagttaagcatggatagaaaaaaggtaatagtacaaatttttactggaggttttaaggctaaagaaataaagtttaatgatataaaatgtaaactactagaattattggactgtattgatatagaaaaggttatcatgggatggagtgtagatgaagaattatatgtagaaactaaaaaactattaaataaatataatgttgaactatatctttggttgccatgtttttctgaaataggattacttgaaaaaagtaatttactaattgattatatggggaaggaagtcaagggctatgctttacaagaggatgaaaattttgaattttattgcccaaataataaggaaaatataaaaaatataaagaaaatatatagtacttattttagtgatattaaatttgatggaatttttttagataaaataaggtatggttctttttcgaataaactaaatggtgtttttaattgtttttgtaaagattgtttaaatatatatgaaaaaaataatattgataaaaagtcgttaatgagagaaatgaataatgtgtctaagggagttatagataatgaagatactccatctggtataacagaatacattaatggaaaatacaaatttaaaaataaaatatgggaagatttttttgaaacaaaaaatcaaaatatatacaagtcattattagagataagtagttattttaaaagtaagggattgaaaataggtatagatactttttctccttttatttcttactttacaggtcaagatttaaaaaaattacaagaagtagcagattttataaaaccaatgatgtatagaactacaaaagctccagctggtttaccatttgaatttgaaaggtttattgatgaatccatacataagaataaagagattggaaaaagaaatttcttagatattttaggaattaaagagtatgaaggagatgtatatcctatagaatttgtactagaggaaatcgattttatgacaaggaatcttaataaagatatatatgtaggagttgaaataaataaaaaggaaattatagctcctgttacacctaagtacataagtgaaaatatttcaaatataaataagacaacagtaaaaggatatgttttatcttgggatttgttatcagcaccaaaagaaaatattgatgaaattataaaatggtttcggaattagtgaggtgatatagtgagtaagatattagaaatgcaacaaatatataaaagttttggaaaggtagatgttttaaaagggataaattttgagttagaaaagggagaagtaagagctcttttgggagctaatggagcaggaaaatctacacttattaaaattttaggaggagttcattctcaaactaaaggtaaagtaattttgactggtaatgaaataatgtttaaaaattcacatcattctaaagaaaatggtattagtataatttatcaagaattaagcttgataccaacgcttacagtacttgaaaatatttttcttggtagagaaattttaaaaggaagtgtgtttttaaacaagaaagacatgcttgaggaatatatgaaaatttgtgaggattttgattttaatatagacccacatacagtagtttctaatttaagtgtagcaaaccaacaaatggttgagataatgaaagctgtttcatgtaattctgaaattatcataatggatgaacctacaacatcacttactaataatgaaaaagatgggctatttaaaataataagtagactaaagtctaaaggtaaaacaatagtctatatttctcacatattagaggaagtttttaaagtatgtgatagtgcaagtataatgaaaaatggaattatgattggaacttatgatgtagaggatttaactaaattaaagataactcaacttatgacaggaaatgataatcacaaacttattgagaagaaggattatacatttgcaaagtatgaagagccaccagtactagaagtaaagaatataagctggtctaacaaaataaaaaatgtttcatttaaagtttatagaggcgaagttgtaggtcttgctggtcttgtaggttcaagaagaactgaaattataaatttgatatttggtatagataataaagatagtggagacatttttatcaatggtaaaaaagtagacataacttctcctaaggttgctataaaaaacaaaataggattgattcctgaagatagaaaaaatctaggattaattttagaacaagctatatacacaaactcatcatcagtacaaattgataaattcaagaaatttttgtttatagatagaaataaagaaattgagttttctaaaaaaggtgttaaggaattaggaataaaagttagtgatgtaaagcaagaagtaaaagagcttagtggtggaaatcaacaaaaagtagtagtttctaagtggttagagaaagatttagatttaataatatatgatgagccgacaaagggaatagatattgctgcaaaagaagatattttcaatacaatcaaagaattttcaagtgaaggaataggagtaatatttatatcttctgatttagaagaagtaataagagtaagtgatagaattttagtaactagagaaggttctattgtagatgatttaaaaaatgagaatatacaggttcaagatataatgaacagtatatttaatgtataaaaaatgaaaatggaggactgagatgaagaaagcttttgagaagttaaatttaagagattatggagtattattaggttttttagctttatgtatagctataagtattgcaactccatcatttttaggtaaacaaaatatacttaatcttttacgacaatcttctataattggaataatttcagcaggtatgacttttgttataatatctggaaactttgatatatcagttggagcagtagcagctcttgcaggtgctataacaatgaaatttgcgactggtggaactaatttgtttgcatccatgctcttaggtgtagcgatttgtgcagtaataggattaatcaatggtatagtagttgcaaagataaatgtaccatcattaatagcaactatggctatggtcactattgtaagaggattgctgttgatgcttacaggaggatatccaattactgaaaatataccaatacttgattacattggaaatggatatttgtttaatataccaataccagtagtaattttctttatagtggtgttagtttcatttattgtacttaataaaactaagtttggtagatatgtttattctgtaggagggaatcaagaagcaagtaaacttaatggtataaatgtagattctcacaaagtgaaagtgtttattattaatgctgtacttgcaggaatagctggaatcgtactaacaggaagacttgggactgcaactgctattgcaggtgaaggatatgatatggatgcaattgcatctgtagtaataggaggtacatcagtggcaggaggttctggttctgtacttaaaactgttataggagtattacttatgagtgttataaacaacagttttaatcttcttggaatagatgtatatttccagtacatatttaaaggattaataattttagcagcagttggatttgattcttatagcaagaaaaaacttgcttcaagataaaaaataagggggatttttttatgaaaaaattaatgaaacatttagcattgttgttatcacttgttatgatatttggtttagttggttgttcaaatggtggtgacaaagaaaaaaatggagaaaagaaaatagcagtattactaccaggttcaacaggttactttgtagcaactaaacaaggtatagatgcaaaatctaaagaattaggtgtaagcgtggaatatgcagatgctcaatgggatgctagtaaacaattatcacaagctgaagattttatggctaaaggggtagacatgattgcattatgtggagttgattctgctgtaagtgagagaatagttaaagctgctaatgattcagacgtccctatagtagcatttacaaattctataggaagtaacccaactggagaatttaaaggtttagttacatatataggacaaaatgaggaggaaacaggagcactaactggaaaaattgctaaaaacttattaggagaaactggtgggaaagctgtattaatagaaggagtaccaggaactactccacaagtattaagaaaaaaaggtcttgaaaaagaattaaaagatagtaatatagaaatagtttataatcaaacttcaaattgggagaaagagcaagctttaaaagtaacagaagatttaattcaaaagaaaactgattttaatgttataatatgtcaagatgataattctgctacaggtgcaggtcaagctttaaaagatgctggtcttaaggataaagttaaagtcataggtttgggtggaagtaaagatggattaaaagctataactgatgggttaatagatggtacaacttatatgtctgctgtagaagaaggtggattagtcatagaaaaggcatctaaattccttaaaggtgaaaaaatagaacctgttacacaaattaaacaagttgaagttaacaaagataatatttcagagttcaagggtgaatggtaaattgtcatagataataaataagatttttagagttactttagaaactatataaagtaactctttttttaatttaatttagtgataaattattgaatagtatttctaaacaaataaaaaattaatataaacaaagacttaattatactaaattataagtaaaactaatataaacttatggaaaaaaggaaaacgtctaaagtattggaattactatagtgtaggtgtggtattaaaaaaacataaaaaaacataaaaaaattgttgaaaaaaatatagaaattttgtataattaaagatttgaaaagttcggtatacaaagccaattcttttgtatataatatatataaattcagaaaaaggaagggatatgtatggccaggcggttatttttagaaaggattggacttatatttttaggttcagcaatattagcatttggagtttataatttttattatttaaacaacataacagaaggtggagtgttaggtattttactactgttaaaaaatttattcaatatacaaccagcaatagcaaatgttgtaatagatggtttactacttttagtaggatataaatttttcggtaaaaaattccttatatattcaatagtagcttctataactttttcagtgttatatgacttatttgaagctataggacctctagtaccacaatcacaaaatatgcttttatcaactattttggcaggtgtaactgttggaactggtgtaggtatagtagtaaaagcaggttgtgcatcaggaggagacgatgctttagcattagtaatttctaagactacatctttgaacatagggcaagtttatttagcaacagatgttattgtattgttgttatcattattttatctatcagcgtttgatatcttttattctttgattgctgttacaattagtggcaaggtaattgattttatttattatcatggtaaaagtttggatatggatataagtaatgatatagttccagaatgttaatataaattaaataactttagattttattaggggtggcagatttgccaccttttttgtgtctaaatctttatagaaagtataatcccatctaggtttttgcaaatctcaaatatagaattatgttggaatgactgggaatacgattgctagatgtgcattttaaaaacccaattttatatttatgaaatactaatcattaatggatgtttcttaatcctatctttatacctaaaatgataagataaatgaagtagcaatacaaaactaaaatttgtaaaagagattaaattaaatggaggagctaaaatgttggatatagttatgatagcattgttattcataggatttgtttccatgaagttacttgctgattggtgtgggaaacaaactgagaaaaaataatgtaatgtatggagggattacctatgtggtttctggcagttgtaattataatgttaataatatatttggtatatgcgcttattaatcctgaaaaattttaaacagtataaggctaataagtaagttgaattggggggaacaatttttatggtgcagatagtaatagtgttagcgatttttatgattttagtaatacctatgggcaagtatttatatcatatagctactaatcaaaaaacatttggagatagactatttgataaagtggacaattttatatataaggtatgtagtatagataagaaaaaagaaatgaactggaaacagtatgcattagctttattatttacaaatgcagttatggtatttataggatatatcatacttagaactcaaagtatgcatatttttaatccaagtggaattaaaagtatggaacaaggactatcatttaatacaataataagttttatgacaaatacaaatcttcaacattattcaggtgaatcaggactttcatactttagtcagatgacagtgataatatatatgatgtttacatcagcagcaacaggatatgcggctgctatggcatttgtaagaggtctagtcggtaaaaagaaaacattgggaaatttttatgtagatttaattaggataacaacaagagtacttttaccaggagctttaattattgggcttatattagttacacaaggagtaccacaaacttttgctgggacagaaacagtgactactatagaaggaaagcttcaagatatagctagaggtcctgtggcagctcttgaatcaataaaacatttaggaacaaatggtggtggattctttggttcaaattcatcacacccatttgaaaatccaacaataatatcaaatatagtagaaatattatctatgatgatattaccaggagcttgtgttgttgcattcggtcacatgataaagaataaaaaacaaggttgggttgtgtttggcgcaatgtcaatcatatttttaataggtctagtagtgtgctttaaagcagaaagtgcaggaaaccctattttatcacaattagggcttaatcaaagtatgggaagtatggaaggtaaggaagttagatttggtatagcacaatcatcattattcacaacagtgactacttcctttacgacaggtacagttaataatatgcatgatacactgactcctttaggaggattagtaccacttttaaatatgatgctaaatgtagtatttggtggtaaaggcgtaggtctgatgaatatgttgatgtacgctataatagcagtattcttatgtggattaatggtaggaagaacaccagagtttttaactaagaaaatcgaaggaaaagaaatgaagcttattgctttacttattatattacatccacttttaatactaatgttctctggtctttcagtagcaataccagcagggcttgaaggaatttcaaatcctggattccatggattatcacaggtattgtatgagtttgcatcttcagcagccaataatggttcaggatttgaaggtctaggagataacactatgttttggaatataacaacaggtatagttatgttctttggaagatatgtgtctattatagtactactagcaatatcaagtttgttagcatctaaaaaagctgtaaatgaaagtataggaacacttagaacggataattttacatttacaatagttttagtacttgttgttttaattgttggtgctttaacatttttcccagccttagcgcttggacctatttcggagcatctagtgttgtggcactaaaaaattgggagggagtaaagttttatggaaactaaaaaaacaaagtttattacaaaagatattttcaaaacttccattatagaagcttttaaaaaattaaatcctaaatatatgatgaaaaatccagttatgtttgttgtagaaattggatttatagtaacattgatacttacaatagtacctagtttgtttggtgatgaaggcaataatttaagagcttataatgggattgtaacaataatcttatttataacagtcctttttgcaaattttgctgaagctgtagctgagggaagaggtaaagctcaagcagatacacttaagaaaactagaaaagatacagtagcaagggttatagatacgttaggaaatgaaaaaatgataagtgcaagtgagctaaaacttggtgatattgttttagtaaatgttggagaagttatcccaaatgatggagaagttatagagggcatagcttctgtggatgagtcagcaataactggagaatctgcacctgtcatgagagaatcaggtggagatttcgcatctgttacaggtggtactacagttgtaagtgactggttaaagataagaataacaacaaaaccaggagaatcgttcttagataaaatgatagctcttgtagaaggtgcttcaagacaaaaaacgccaaatgagattgctttaaatactttgttagtagggttaacacttatatttatggttgttttaatatctctttatccaatggcaaactatgcaggtgtaaagattccaatttctactatgatagctcttttggtatgtttaataccaactactataggtggattgttgtcagctattggtattgcaggtatggatagagtaactagatttaatgtaattgcaatgtcaggaaaagcagtagaagcttgtggagacgttgatactatgattttggataagacaggtacgattacttatgggaatagacttgcatcagaatttatagcagttggaaatgcagattcaaaagatttaataaattattctgttatgtgttcattaaaagatgatacaccagaaggaaaatctatagttgatttaggtatgaaattaggttcaacaggtaagacaaaagaggcagaggaagctgagtttgtagaattttctgcacaaactagaatgagtggtattaacttagctgatggtagagctataagaaaaggtgcttatgatagcataataaaaagagtaaaagaatctggtggtacagtgccagaagatttagaagaaaatgtaaatcgagtagctaaactaggaggaacacctttagtagtgtgtgtagataatgagatatatggaattatctacttaaaagatacagtaaaatcagggcttgtagaaagatttgctagacttcgagagataggaataaagacaataatgtgtacaggggataatcccttgacagcagctacaattgcaagagaagctggagtagatggatttattgcagaatgtaaaccagaagataaaatagatgctataaaaaaagaacaattagagggtaaaatagttgcaatgacaggtgatggaacaaatgatgctcctgcacttgctcaggcagatgtaggtcttgcaatgaatagtggtacaacatctgcaaaagaagcagcaaatatggtggatttagattcagacccaactaagatattggaagttgttgaaataggaaaacagcttttaataactcgtggggctttgacaacatttagtatagcaaatgatgttgcaaaatattttgcgattataccggctatatttactcttgcaatacctcaaatggagatattaaatgtaatgaaactttctacatcatttagtgcgatattatcagctttaatatttaatgctataattatcccatgtttaatacctcttgcaatgaagggagtaaaatatagacctatgaaatcacaagctatgttaatgagaaatatgcttatatttggtcttggtggagttatagtaccatttttaggaataaaattaattgatttattgattacacctttagtaatgattcttaatttaggttaataaatggaggatataaaaatgaaaacattaaagccagcattacttgtaagtattgtattgttagttgtttgtggacttgtatatccacttgttttgacaggtgtaagccaagttgcatttaaagataaagccaatggaagtatgatagaagtaaatggtgtaaaagtaggttcagaacttattggtcaaagctttacagatgcgagattctttaagggaagagtatcatcagtaaactataatacttatacaaaagaagatttagtaccagataaagatggaaatgcatcttatggaggtgtatcatcagggtcttttaattatggagctacaaatccagaacttcatgatagagtacaaaaagatatagaaaagtttttaaaggataatccaactgtcaaaagagaggatataccaacagatttacttacagcatcaggttcaggacttgaccctaatataagtccagcctctgcaaaaattcagataccagctatagcaaaagcgtctggaatatcagaaagtaaattacaaaaaattgtagatgataatacttccaaaaaactttttggagttttaggtgaagatagagttaatgtactaaaggttaatatagaggtcgcaaaaatattaggtcttatatagtattttgtggaattttagtaacaaaatattactcaagatttaatttaaaggttaaattttaaagagtgaaaatcaataatgattttcacttttttatttgaatattactaatatttggaataaagtgattgtaagtataaaatccaaaaaaaggttgcattatcaaaatgataatactataatatatttatcgttatcaatttgataatagatttggacatataggaggaaatagtatgttatataataacgcattagagttgataggaaacacacctgtagtaaggctgaataatttaggctgtactaatgggtgttctaacatatatgtaaaattagaaaaagtaaatccagcaggaagtataaaagatagagctgtttatgaaatgttagagggcttagagcaaagaggagaattaaaaaagggagatgtactagttgaagcaactagtggaaatactggtattgcattatctatgataggaaaattaaaaggatatgaagtagtaatcgtaatgcccgaaacaatgagcgttgagagaagagatttaatgaaggcttatggagcaaatttggtgcttacagatggtaaagctggaatggcaggttccatagaaaaagcaaatgaacttttaaaagaaaatccaaactataaaagcttaaaacaatttgaaaataaagataatccaaatgcacattataaaacaacagcagttgaaattatgaatgatgtcaaagatttagatatattcgtatgtggagttggaacaggtggtactttaataggaactgcaagatatttaaaagaacaaaatccaaacataagagtaattgcacttgaaccaaaaaaatctccagctatatcagaaaacaagactggacctcataaaatacaaggaataggtgctaactttgttcctgaaaattatgattctagtgtagttgatgaagtaatattagtagatgatgaagatgcatttgatacagttaaattacttgcagcaaaagagggaattttagtagggatatcttctggagcaaatatatttggtgctatagagatggcaaaaaagtatccagataaaaagatagttacagtagctccagatggagttgataagtatatgtctatgggaatattttaataattttatttgagggagtgaatactttgtttaagaaaataaataaagatattgaatatataatgaagaatgatccagcagctaggtctaagatagaagtttttttactttatccatcagttcatgcaatgataatgcataggatggctcatgctctttataagaagaagaagctttttacagcaagattaatatcccagatatccagatttatgactggcatagaaattcatcctggtgctaaaatgggggaaggtatattgatagaccatggaatgggtgttgtaattggagagacagctgaagtaggtaatagggtgacaatatatcaaggagctactttaggagctacaggaaaagatactggaaagagacatccaactgttggtgatgatgtattaattggtgctggaacaaaaatactaggacctttaaatataggttcaaattcaaaaattggtgcaaattctgttgtcgttaaggatgtacctaatggtgcaacagttgttggtataccagcaaaaatagtaaaaataagaaacctagaacctgtaaaaaagaataaaaaagaagtgtcctatgagtatgatgaattagataatgtatattatatataggatttatataactataaaataaactttataaaaattattttaaaaggtatttttttcaaatttgaggacataataaaaaagaactgaatgttacagttttggttcatcaatctttgataaacaagattttaaatttgtagcgtctaggaggattttattatgaaagcaaatgttaatcaagatacttgtataggttgtggattatgtccatcaatatgtccagaagtatttgatatgaaggatgatgggaaatcacatgttatagttgatgaagtaccaagtgatgctgaagaatcagcagcagaagctagagaaagctgtccagttgatgcaatagatgtgcattaataaaataaatgcctataaaaattgaattttcaatttttataggcatttgtcttttattcagttagtatttcaacccctgtttctgtaactaaaaccatacattcccattgagcagataatttaccatcttttgtataaatagtccaattattttcttcatcaacaaaaatttcgtgagttccttcatttaccataggttctattgtgaatatcatcccaggaaccaatagcatctcagtcccttttttagatacataacttacaaaagggtcttcatgaaagcttaatccaactccatgaccacctatttctctaacaacagagtatccatttttctttgcataagagttgatagcatcacctatatctcctaaaaatccccatggtttggcaacttcaagacctttttggacacattcctttgtaacttgaactaatttttttgcattttcattaacattacctatcataaacattcttgaagcatctgaatagtatccattaaaaatagtagaaacatctacatttataatatctccatcttttaagataatgtccttgcttggaataccatgacaaacttcattatttactgatgtacatacacttttaggaaatccattatagtctagtggagcagggatagctccattttgtagtgtaaagtcatgaaccaacttattcatatcttctgtagacattccaatttcgattttatctgaaatataatccaaaatttttgtgtttattacagcacttttttttatttcctcaatttgactttcattttttataatatcatgagttggtacaatatgacctaacttagcaaatgaatctattttattatccatatccatatgacattttttatattttttagtacttccacaccaacagctatcatttctatttaacttcataacttttcatccttcttttattatttatttaaattatgggttacataaactattttaaaacataaccattataaatattataacataaatactaagaaatcctttatagatagtgatttattcaaagtataaattattatatggttattgttgatgaaaagaggatagttaaatgtattattggatattagcgcacttaatagtttagttcaagtttttcaagaaaatcatatgttagaggacaattttcctttaaagtattttttgaatcttcatcaagataataatgcacaaatgattctgcaaaaaattcttctataaacttgcttatatatgcatgtgcaacttgtttagggtcataaagcttatatctttcctgagcaaatacttccataaattcttcagaatttgattttttatttaaaacatttttatctatagcatgtgcagtttcatgtaattctaaattttttgatgaatgtacatttgcatagctagggttactataacctattttagctactatagaattatttctatatataccaggtacatctttccaagtcttgcctgatcttacccaacatggaggtaattgatattttaaatcactaaattctggttcatcagttagatttgaatttattaattttatttttatatccttttctttaagtgtctgtaaatatttaatatttatttttgcaagtctgcttttcatattttcaacttcatctttatcataattcaagtcatcaggaagtataagcatttgttcaattatatctatgctactgtcttttatatcttcagattcttcatcaaatttatattgaagagtattattttcatagatagttatatttgtattattttccatataataagagtgaatatcctctaagtctaaaatattcatttgttgtaaaatatgttttgtttcgccactccatactactaaagaaagtgaattaaaattaattagtggattttcctttgcttttatatcattgcttatatctacatcaaatacatattcaattgagtcttctatgttaagactatctgtattctttttaatatataaatatgcttgttttaagtctatataaatctcatctaaagattcatcataaaattctgataaattattagtaaagagttcttcacttaaaagttcatttttatcagttatactttcaattaaaatattaatttcttttatcatatcgtaaatacttatttttctatttgctttttcactagatacattgcatggcgcaagagcaatgcaataaaaatctttttcttttttataaaaggctttaagtgattttgataaaagtgtaaagtctacacctatctgtaagttgaccttaagtgagtcattttgtaataattcagtattattttttttagctatatttaaattgttttccataatcattgccccctttttattagggtatcataatttttttatatgtgtcaatttgtttttttgaaaattataatttttttgaaaattttattttttataatttgtgaattttttattatagaaataaatatgttattattatgtcaaaatttagcattagattcatgtagagtatgttttatacatatattataattaattctttgaagattgcatattcaaaatacacaccattttttttaattctataatataatatttatatatttaatgttaggatgtgatttaaggtgtattttacatatattataagatgtaaagatgattctctatacactggatataccagtaatatagttagaagaatgaatgaacataagttaggaattaattcaaaatacacaagagcaaagggatttgaaaaactagaagtttattttgtgaccaacacaaaaagcaatgctatgaagttagaatactatataaaaaaattaactagaaataaaaaattgtctataataaaaaacccaagtatacttataaatttaattgataataaagaagattatattattggtaaggaaatagaacaattaacataaatatttatagtaacattataatgggtgcatatagtgtaaaaacttgacaataaatactattgtaatataatgaagttataaatatagtaaattaaaatagctaggggagccaagagctgagaggtataccgacccttacacctgatctggataataccagcgtaggaaagcttagtaaaaattcaagtatgtattatttgtgatatatgctatttctaagctatacctattgtaggtatagcttttttaattaagttatttaaattaaactttaggaggcaacaatgagtaattataaaataccaacacttacaatagctggctctgattcatctggaggagctgggattcaggctgatttgaaaacgtttagtgcaattggtacttatggtatgagtgtaataacagctataacagcacagaatactaaaggagtttttgctgtagaggatttaaataagaaaataataaaaaaacaaatagaggcagtctttgaagatatacctccaagagctgtaaaaataggaatggtttcaagtcctgagattatacttgaaatagttgagaatctaaagaaatacaatccaaaatatttggttgtggacccagtaatgatatctaaaagtggatattatctattaaagccagaggcaaaagaaaacttaattaagtatttgataccacttgcatacataattacaccaaatataccagaggcagaagaaataacaggaataaaaatacataatgtagatgatatgaagagagtaggagaagaaatactacaacttggacctaaatttgtacttatgaaaggaggtcatttagatggagaagcagtggatattttagttggtaaaaatatatttaaagtttataaaagtgaaagaattgataaaaaaaatacacatggaacagggtgcacattatcttctgcaataacatcttatctagcattaggatatgaaataacagaagcagtaaatctaagtaaaatctatataacagaagcaataaaaagaagttttgatataggtcatggagtaggaccagtacatcatttttataaatttgagtaataaaaaaatattggaggtagaatatgtataatttaattaaagatgtaaaaaaattaaatccattggtaattcattatactaataatgtaactataaatgattgtgctaatgtgactttagctgtaggagcaagtcctcttatgagtttttcatatgaggaagtagaagaaatggtaagtgtagcaaattctgtagtaataaatataggaactatgaactcaaatatgttggatttatttctattagctggaaaagcagcaaataagtacaataaacctgttgttttggacccagttggagtatttgcaagcaaagcgagagcagaacttacaagtagacttttaaatgaagtcaaatttagtgttgttaaagggaatgtatcagaaataaagtttataggtggctttaatgtaaggggtaaaggtgtagattcatttgatgaagaagaagattctactgagataataagaaagattgctgaaaagcttgaatgtgtagttgtagcaactggaaaaatagatataataactaatggtaaaggtatatataaaataaacaatggaactgataaattaaaaggaattacaggaactggatgtatgactgctagtttgattgcaagttttatggctgttactgagaatatattagaagcagcaacaatgggtgttcttacaatgtctttaagtggggaattagctaatttaaataatccaccaataggtacatttaaagaaaatcttatgaatgctatttatcaaatggatatagatactttaagtaaaaattctaatattgaatttttaaattaataaagagtaagggagacttaaaatgattgataaagaatctttaaaaaaatgcttaaagttgtatttggtaactgactctgaaatgcttaaaggtagagacttttataaatgtcttgaagatgcaatatcttctggaataacaactgtacaacttagagaaaaaaatgcttctggaagagagtttttaagaaaagctatgaaacttagagaaataactgaaagatatggtgttaagtttataataaatgatagagtggatatagcacttatttgtgatgcagatggagtacatgtaggacagagtgacattgatgtgagagaggttagaaagcttataggaaacaataaaattctaggagtatcagcaagaactttagaagaagctacttgtgcaaaaaatgatggcgcagactatttaggtgtagggtctatattcacaacatctactaaattagatgcaaaatcagcttcgtttgaaactgttaaagaaattaaagaaaaagtagacatgccatttgtgctaattggaggtataaatttagacaatatagataaacttaaatgtttagaaagtgacgggtatgctataatatcagctatattaaaagctgaagatatctctaaagaagtggaaaagtggacattaaaaatataaaattggctctggtagtgaaaaaaatggaaaaatttgatataatctaagagtaaaatttaagcaattataaatgataaacttttctacatatactttttaatcaagatatatgtagatttggttaaaaaggagctataaatgattaagatattgttagtgtgtgttggaggcatgtcttctaccctattggtaaataaaatggagaaggatgcaaaaaaaagaaatatagactgtaaaatatgggcagttggagaaggagatataaaatcggagcttgataactttgatattttacttcttggaccacaacttagatttatgcttgatgacgtaaagtctatagttggagatagagttccagtatctataatagatatggtaaactatggtacttgtaatggtcatgctgtgttaaattcggttttagaaatattaaaataaataataaaagtggattctatataatagagtccatttttattatttgttattaataggcttaaaacttagcttaccatttctttttttaatctccacatagcaagtgaaaaacttgaacagcacaatattaaaaatagtaggataacaggcagtatatctccaataagaatagtctcaccaaatattaagctacgtaaagcgttaataacatgggtaaatggattgagcatcactgctacttttaatcctccagataaactttctatagggaaaagagctgaacttaaaaagaaaataggaagtacaattgcagtcataattgtttcataaactatttcatttggcaataataaacttatagaataagctagacttgataaaaagaaggctgtcataaatatcagtactatcataagtaggattccaccaatgccagattctatccttactgagaagaatatacttactatacacaaaatagttacttctatgaaggaaactaagatagcttctaataattgaccaaggacgattgaatacctactgataggtgcaattaagactctatagaaacttccactgttcttcattataaagtttataataccaccactactacaagaagaaaacacaaccagtacaatgatacctggtagtataaaagcagtataattattgatatttatattattcatagtttggtttgcaatagaactataaagcacaagccaaagaaaaggttgtaatatagtaactacaaatgagattggatttttaaaacgccacttcatactacgccataagatatttaacattcccattcctcctttaagctttttttagaacttgtaagtgctaaaaatacatcttcgagacttggctctacaatttctattgcatcaaattctatatcatgttctaaaagccatttatttattaaagtaaaagcagttctactatcgtttacacttataaaaattgaattttctcgtacgctcataaactttactaaaccagtacttttaattgaatctttatatttttttatatcttcagtattatggaaagttatacgtagtatattttgtctaatgtaactacgtaaacttgatggtgttccttgtgctaaatcctttccattcttcataatacaaatattatcactcaattgttcagcttcttcaagataatgagtagttagaaatatagttgtgccgtactcatctctaatttttaataacatatcccacatagattttcttgaatcgacatccataccaacagttggttcatctaaaaataggattttaggagatgataccatattcatagctatgtccaatctacgttttacaccccctgaatatgatgaagtaggatattttaagtaactagataagtcaaacttatcaattaaagagtctattctttgttttgcaatctgtggttctactttatacattttactttgaaataccatattttccataagggataaatgttcatcaatagagatttgctgtgctacacaagcaatttgagtacgtatccaagaaggattatctactaaatcttttccaaacatttttacatttccagatgtaggtttgtaaaaggtagtcaaaatatttataagagaagatttaccagcaccattaggaccaagtaaagaaaaaatttctccagcatttacattaaagcttagaccatttaaagctttcacaccatttttatattcttttactaaattgtctatttcaatcgctaacatatattattcctcctctttaagtggaaatattatctctgtaatatagttatctgggtttccttttatcaacatacctggtcctttaataaatacttctctccaaggagtttgtatttttatattattttcatgaatatatttaaatatcatttcatacgtttttggcaaattactataagagcctgtgtgagtaaaaaataaagcttttgttttaggaaattcttttgtagttatacccatacgatttggagtttcagcagttggaacacataattccatttctgcaacaccagttttttggtcaacatcatagtagcaaaagaatggtgcaccgttagactttccttttatagctttaaatacatttggaaaatactttgttgcctcagtcataggtccattataacgcatggtagccactgtgactgattcgatatttttgatttcaattttgcaattcatttgtttacctcctaatgtgtgttcatattcttactagatttttaagcattaatacatataagattttgattagttgaaaacatataatcttatctcgtttgcttgttttcaagtctaacataacataaaatatatatcctctcatttgatgctccattttgtaaagctattatttaagctttactttagattttttagcaaattgaaataaagcaatttataaaataagtatttacaaattaagtgtattaatcgtataatacacttaataggatactagataaagtctgaaataaaggcgtatttttttaaagtaagtgtactatcgtattaatacactagaataggaggaatcatgaattttgaattagataatacaactcccatttatttgcaaatagtaaagtatataaagagacaaatagtaacaggagagttgaaaccaggagagacaataccatcaagaagagaaatggcacttaatctaaaagtaaacttaaatacagttcaaagagcatataaggagatgggtgatatgaatataataaatacttttaaaaattatcaaagcagtgtaacagttgatgaaaatatattaaaaaatttaaaattagagcttataaatgaatcactatctgtttttatagaagatatgaaagcaataaatgttagcaaagaagaagttttaaaaataatagaagataagtattagttttttaacaaatagaaaacttagtttagaaagtttatttataagcatattggatgtggaggatagtaaatatgatagaaataaagaatgtcagcaaaacatataaaaggatgcaagggcttaaaataagaaagatagaagctttaaaaaatgtaagttttaatatagaaaagggaaaaataactgcattacttggtataaatggtgttggtaaatcaactatgttaaaagcaatagcaggacttataaacattgatagtggagaaattcgtatagatggagaaaaaataaatgaaaaggtatacaataaattggcttttgttccagatgtacaatctcactttagcaatacaacaataaaagaaacatttgaatttatggaaattttttattcaaagtggaataaagaaaaatcaaaagaaatgatggacatatttaaattggatgaagatgaaataattgataacttgtcaaaaggaaacattgcaagagtaaaattaatacttggattttgccaagacccagagtacatacttcttgatgaaccatttacaggaattgatttgtttaagagggaagagtttataggagtaatagcgcaatatatggaggaaaatcaagccattatcataactactcatgagatagtagagatagaaagtttagttgatgaggttgtaattcttgatgaagggcagattataacttcatttaatgcagaagaattaagagaaagagaaggtaaatctatattagataagatgagggaggtatataagaatgaataaacttctatatctaataaatgtagatttgagaagaagcaataagttttatatagcttatatatcatttttttcattaattacacttagtttaaatttattcgaaattaataaatttaaaaattctaaatttattatgaacttagcaatagaagattttggaggtatattttatggactagggatacttagtaatcttggttttatccaaaatatattgttctttggaatgttgggactttttatatactatatttttatgtggaaaagagagttcttttcaaataatcaaagtatttatacacttatgatgttacctcaaaataagtttaagatttgtatatctaaatcaatagttttgataacaatgatatatggttttttgataagtcagacagcaacattatttatatgtaaatatatatttaatttcatttttagaaatattcctataatcaatatgaactttgccaaagatttatattatttaaacttgaagagtataccaattgattttatctcttttatggctatttatgtatttttactacttatagctatttctattgtaaattgctgtatattatttatcttttcctatataaataaattttatgtaattttaatcactttgctgattatagcaggcttatatttttcaacaatatatataaatataatcaatttatttagaaaatattataatcttataggatttcaatttaacaatttagtagcagggttattaagttttttaattataatgtttattctaaatggaatatcttatttgctaattaaaaagaaagtatctctttaaggaggggtggtatgaaattaaaatctaaaatatctatacttattatatttttgactttagcaatatattttagtataggtttattaaataatgaagataatttaaagataaaaactataaaaggtgactctaatgaattagaccatataaacataaattttggatatgctttgaatggatatataaattcatattatacaataaatggaagtaacaaaactaaaaagactgaattaataaaactacaaaaggatagtaagaacacaaataatttaattgatgtatctagtggttcagatttaattgctcatgttggatttgaaatgaatgaggagtcaaaagatataaactttgtgatagatgagaaaaaagaagatttagaaaaaggtgtatttccatcagaaggtagtgataaagaaattgaatatgaaaaattagatatgaataattttacaaggacaagatataaagtagataaaagtacagatgattattatgcaaatatactagcatcaaaaagatataaaaaatacttatatgtatctgtactttatgctacaagtgattcatcagaaaataacaaagaatattcaagtactatagatataataaaaattaatccagaaaataaaaaaatcaagactataaaaagtataaatttaagtaattatttttccgagaaataccaagacatagagaacataggtgtaagttatgctagcaaatatgaggataagatgtatattttagtaaatgtactaaatacaaacataggtgataatagtaattctaaatttcatttacttgagtataatcttgaagaaaataaggaaagcataatggaattaaaaactgatagcaaaatggctttagcaaaagcaaagttagaagctaataaattatatatggtaatgtcgaatgattatgataatagttcaattacagagttaaatttacttacctataatatattagataaaagcttagatgaagataaatatgttttagataatagagaaaaaagaggaattagaagtattgaaattgattcaaataaaatcgttgcatatacatcaaggctaaactctatattatcttgggataataaatttatgctatatataataaataaaaattctaaggaaattgtatatgaaggagaattacaatttaacagttcaaatagtatgttagaatttgaaataaagtaggtgagttgatgaaagatttaataagattattcgaatttgaattaaaaagaaatataaagaattatatatttataataatttgttgttgttcttttgtaattttaaacatagtaaaaaatttaaatgactataattacataatagaaaatgcagttaaaagtgaacagttaacaaaaatcggaaatacgatagaaacggtaaatgttacaggtttctcaagctttagaaatataatgggttctacagaatcgtggtttatatttggtataattgcatgtatttgctatgctttttttatttggtatagagactttaatggtaggagtaaatctatatatacacttataatgctacctaaaaatagaatcaatatttatatatctaaattattaaatatattatttctagtgtatagctatacagtagtacttacaatatctttgtttattgcaagtaagttgttgcctagacatatgcttggtaatgtcacaaactatggttttgtacaagaaacaatatatgagttaaaaatgttacttccatatagctttgaaatactatttgtagagtatatatttttattgataggatttgtatctgtagtatttacatcaattcttataaataaatctatttataaagtaagcactttaataagttttctatttttagttttggaaattttagtgtttataatttctatagaatttattataccttatgaatacagtgatgtatttactgttctatattcaagtataaacatatttgtatgtagtcttatatctaataaacttttgaagcaaaagattgacttttaggagggatattatgaaagcaaaaaatataggaaaatatacaatatgttttataatagtatgttttttaatgattactatgaccttaatattgagttattttaataaggataaactatctgtaaaaactttaaaaggcaatgtaaaagatatagggagagtaagtgtagtatatacacctaatataagcaaattttcttatgaggaggtaattataagtaaaaatggagtaagaaataataaaaaccccaaatcaagaattagaaatgattatttaaatattgacaaaaaatacagtgattttgttaatgataaaggaaaagaacttatatataaagatgatttgaatataggagaagcgtatacctctgttaagtctgatttagtacaaggaatgaatgctttaaatgattgtataaaggtttcaaataaaaatttaaaaagtggggtagaagaaaattttgatattaatttaaataagtctgattttaaagaaaacagttggaaaaccttgtttaataaaatatataaaggcaatttatatatggtaattagtgaaactaatatttcaggttctaaggtcaataatatttgtatattaaagatagatataaaaaataagtcttataaattattaaatagatttaatttaggattacagaatggatatcaacaaaatatcaatgaaattaaattttctattggaagtaaattatacttagaaatagtaaataataaaagtaaaaatggagatattgaaggacatgatagttactctaaccttattatatatgatatagaagataacacttttaatataagtaataaatttatggataatctaaacaaagaaaagaatgcaaatccaaaggagattggcttattaagtaaaactaagctagattatatgataaaaaataataaattgaatcttatagttacggatatgagtaattccataatcaatcttgtttatgatattaattctaatgagattaaattagaagattatgagatacttgatttaaaagtagattataatgaagcatcatctggagttaggaaagttaagttactggatgataagatttattctatttcaggtatgaagaacagtatatcaggagaattaaaaggatttaaagggattgttgatgtagtcggaactaagccagtaaaatttcaagtatttgatatgaaacttaaaaagaatatttatgaagctgagctaataaatggagatataagtttacaagaaaagttattttttgttgcaaattaagtattagaattaattttagaactttaaacttttatatgtatcacagataagtataagtaagggagtgtctcaaaataaactttttagttcatgagacactttttttatatgaaatcaaatatattttcattgtttagatttattttgataatgaaaaaaagattatctttattttaagaaagacatttatttataattatatacaaaaatattttttaatgtttttgtgtataattataacaatttaatttatattaatgcacttaaatttgaaatagaatgcttatagtggtaaaattaattattagaatattagaaataataaataaataatacattgtacttaaaagggggagaaatttaagatgaacaaaaaatatattaaagcagggaatttaattgatggaacaggaaatagtattatgcaaaataagggtataattattgatggagatactatagttgaaattgaagatataagagatgatttaaatggatatgatgtgtacgattacttagataaaactgttatgccaggcattatgaattgtcatgttcacttgacaatggagccagttggaaatccaaagatatattatgataatgtatcagatgtagagcttgtagtaaatacgataaaacaagttgatgcttatttggattcaggagtaacatatattagaagcttaggttgtcccaaatatgtggatgtacaacttaaaaatcttatagacaaagggtctatagatggtcctggtatagttacttcaggtccagttatatgtatgacaggagggcatggatattattttggtattgaaagtgatggagtggatgaatgtagaaaatcagccagaacagttttaaaaaatggagtagattgtgtaaagataatggcaactggaggtgtaacaactgatggagttgagccagggtcaccacaattaactttggaggaaatgaaggctgctgtagatgaagctataaaagcaggtaaaataactgccacacatgcacaaggaagaactggtataaaaaatgcagttcttgcaggaattacttctatagaacatggtgtttatttagatgatgaaataattgatttgatgcttgaaagaggaacttacttagttccaactgtggctgcaccatattttattctaaatgcaggaaaagaaagtggaataactgaagctactcttagaaagtgtgagattgttgccattccacataaagaatcattcctaaaagcatataaaaaaggaattaaaattgcagttggttctgatgcaggaacttcttataatgaacatggaaaaacatattatgaaatgaagctaatgtcagattatggtatggataatatggatataatagttgctgctacaaaaacagcatctgaacttttaagaattgataaaaattatggaactctagaaaaaggaaagaaagcagatgttatagttgtaaatggaaatccagtagagaatatagacgtacttgcagatgtgttagcagtatttaaacttggtaaaaaagttagataaatagtataaaaataaaaaagagtgtctaaagaaatttttaaataattatagacactcttttttattagtaataattaaatcttttatactttagaaaatagattctattttatatttagatataactctttaaaatcattcttatgcaatataatctatagaatctacacatacaaagtatattcttgaatcattagaatttccaagtactataacatcatttttcttacctagaacttcaacaccagttagaaccaaactaccagctactacagtaacttgattatttatatttgacatataaagattatctaggatacctttattacaacagcaatcatcacaatcgcagttacaattacattctttgtaatgttttttatcaagatagtaacctaaagatgctatgaaatcttcataatctgcaggtgtaatatcaaatgcaacagctttaagattacacaatgatgctaaatctacgtttgctaatggagtagatgcagcaagtataaaatcaattatagcagcaagtattgcatctaatatagccccaaggtctatcgtaggaggaataactgcatcaataagtgcaattaattcagctactcctggtatagttcctatagtattaattaatccctcaagagttaaagggactggaataggataagatactctaccagctatatctattaaatcacagttacaagcagaaaatctttcaaaagtaccatcaagtccagataaattatcttttggaggagctgaaagatctatacctaccaaattagcacctactataaagaaatctgagataaaagcaaattgattaaagtttacaaaaggtcttagagcatcatatcttagaagttctaaggcctctctcatactttttttacaacaacattgttttattttaggttctttatatttatttggataattatagtatctatcagctacttgataattttcatagtatctttcatttgtatttggataatcttcctcatattcttgtgtaaatctaaagtcctctctacatttattattttccactaaatacactccttttatattttaatttaaatgtatagataattaagcttatctatatagtaatattatatttataatgtaaaaaaatgttacaaaagatattataaacgaataaaaaataataatttgtcagataaacttgtaaatttttatgaataatccattctaaaacaaaaaactgtgtataaaaaaggtttatatgttatatttatataaatataacatatgaacgagaaaggagtggtttgataaatgattgaggtagataaattgtgtaagtcttttacaagggttgtaaaagatgataagaataaaagttcaataagaaagctaaagaaagtaaaaactaaaaaagaagaattttttgctgtaaataatgtttcatttaaagttatggaaggtgaaattgttggaatattaggtccaaatggtgcaggaaagactacattacttagaatgttaggtggcatattaacaccaacatcaggaagtataaatatttctggatatgattattcaatagatagaaattcagcaaaaaaagaaataggttatctctctggaaatacaaaactatatggaaggctttctccgagagaacttctaacaacttttgcaagtctatatgagatgtcaaaagaagatatagaagaatcaattgaaaatattgtaaaaataatggatatgagtgaatttatagataatagaattgaaaatctatcaactggtcagactcaaagaacatctatagcccgttgtttaatacattctccaaaagtatatatttttgatgagccaacactaggtctggatgttttaagtagtgcatctattatagattttatgaagaatgaaaaactaagaggaaaaactgttctttactcaactcattatatggaagaagcagaaactttatgtgacaagatttttatgattcacaatgggaaaataattgcatcaggaacaccacagagtttaaaagaggaatctggagtaaataatttgagagatgtattcataaaacttgccagaaaggaggacatttaaatgagaagtaagattgtaaaatacatatttaaaaaagaaatgttagacatattgagagataaaaagactttatttatgatgattgttgtgccacttcttttatatcctttacttatgttattaatgattcaagtaatgaatatgtctgcaagtagtatgaatagtaaggacattaatatagcttttaataataaacctaataaggtgttagtatccatgattgaagatgataatttagaaaaagatactaaaaatacttcaaatgataaaggcaaaataagagtgttagatgtagataactataaaaagtcattagaagaaaataaaattgatgcttatataaagatggaagaaaaaaaatcatctataaattatcaaatatatataaattcttctcaagaaaattcttctaatgcactaaaaagaattgaaactgttttggataaatataaaagatttaccatagaaaaaactttatctgaaaaaggattagatgtacaagctactttagaaccaataacatatagcactgtagatgttgcaaagacggaagaagtggcaggatactttttaggtcagatacttccatttatattaataataggagttttactaggttcaatatatccagcaatagatgttatggctggagaaaaggaaagaggtacattagaaacattatttacactcccaatatcaaacttagaactggttatgggaaaatatatggcagtttctcttagtgcaatagtaacagcaattttaaacattttatctatgggactgactatggcatttattttagttagtggaggtattagtagccaatttggctttggaaactttaattatggagacttagtcttaccaattataactactttaatttgcatatgtcttttttcaatggtagtttcagcaataagtatgtgtgtatgttcattagcaaaaagttttaaagatgctcaaaactacataacacctcttatgttaattattatgataccatcatatgtttctatgataccaaatatagtattggatagagtgacagctgtaatacctgtagtaaatatatctttacttataaaaagtgtattatcttttaaaagcgatttaaatttaatagccttagttttagcatcaaatgtagcctttgttatattggcaatcatactactgtctaagatgttcaattctgaggaaatactttttggtaatagtaagagtttttctttcttagagaaaagaagtaatataaaaaaagggtctataccaactgtaagtgatggtgttattttatatgcagtaggattagttctattgatttatgttggttctttagttcaaattaaatttggtatggcaggtattataatgacacaattcatgataatttctttaccattattatttgcatgctatattaaagctgattttaaagaggtatttagcttgacagttcctaaattaaagcatgtgtttgggagcattgttctttggattggtggatacatacttattatgattataacacagctaattttattcttatttcctcaaaatatggaagttgctgaaagtttaaataaggctctttttatcaaagatagtgttttactgaatttactagcaatagctttattaccagctatatgtgaagaactgttttttaggggatttatattttcttcatttagtaaatcaaaagataaaaataagtctatcaaactcgctataatatgtagtggggtactatttggtattatgcatatggattttattagaataattccaacatcaatattaggtattatatttgcatacagtgtgtataaatctggttcaatatttgtatcaatgttattgcattttttaaataatagtgtagcagttgtgttaaatcattatacaactggaaatataaccaacttatataaatttgttgaagttgatttttcgaacttaaatgtacttaaatttgccttaattcttctaataagtcttatattaattatgttaggattaagagttttagatagaaagtctttaagaaattaagtataaagttattatatagattaaaatattaataagcactaaagtatatggatatatcttgtatataaaaatactttagtgctattttatatattttaattatatgaattatttatcgtttcatttatgtaatgaaaatgttatataaatgaaacaataaataatttttattttagaaatttatatttaaataatcaagttgaaagtgagatactaaaaaaattaatttaggaattatttgatttattcatttataaaaattaattactgatttgtcgaaaccattgtaataagaaaaaaatgaaaaaataaagtgtgaatatgttgcaaatactgtattttaataaaaagtagtcatttcttgtaaaatggatagtttatatctactttaattttgtaaaattttctgctactataattatagaatgtagcatattcattgtcttaactattgatttatatatttcatataggtataatagaaaataaattggattattttggcatataattatttattaaaaggtgattatttttgtttgaattgtctgaaaaattttatttttatattataattttaatattttcttttcaaaactatccattttacaagaaatggaaacttttgagatgtacttatttgctaataaaatagaggtgttttaatgggaggaaatttttatgaggaatttacaaaaaaaattgatgttttttttatttatttgtataattttacaaattacatacacaacaccagtctattctttatgcaaactctataaaaacaactccataaataactttgagtctattgtgtctaataatcagtttattagcaaatatgcaatacaaataatacttattatggctataatatgtatgatgcttatattctatataatatatgacaaattaaattttaaaattaaattgcaaaagatagcatatacagataatcttacaggagcaaatactatagataaatttgtaattgatgctaacaaaatactatgtaaaaatactcaagtaaagtatgctttattatatatagatattgataaatttaaatatataaatgatttatttggatatgaagttgggaatgaaattttgcgtaatttaacaaaaattattaagagtaatatatttgaagaggaaatgtttgcaagaatatctgcggataattttattataattatgaaatatatagaagaagaagatataacaaagaggttaaaaactatatttgaggaattagacttgtttaataataatcaagaagaaaagtataagttagttttaagttgtggaatctattttatacttccagaagatagagatatcaactcaatcatagatagggctaatatacctcataaaatggcaaagggaggacataaaagttcatatgcattttatgataataagattcatgaccaagagataaaagaaaaagagatggaaaatacaatgttttcaagtttagaaaataaagagtttattatatacttacaacctaagatagatcttaatacaggagagatacaaggttcagaagcacttgttaggtggaaacgtcctgataaagggctaatacctccaaatgaatttatcccattttttgaaagaaacggttttgttataaatttagatttatatgtgcttgaagaagtatgtatataccttagaaaatggattgatgcaggaataaatccagttactgtttcagttaatgtttcaagaatacatttatattgcaataattttatagaaacatacaaaaatataattgataaatacaatatacctgcaaagtatatagaacttgaattaacggagagtatcatatttgataattttgatattttaattgatataatgaataatttaaaaaaaataggatttttaatatctatggatgattttggttcagggtactcatcattaaatatgttaaaagaaattcctatggatatcttaaaacttgaccaaaaatttattatggaaacttataatagtaaaagaagcaaaataattgttactaaagtaatagaaatggcaaaagagttgggtatgaaagtcatatcagaaggagttgagacagaagaacagtttaaacttttaaaagaagtaaagtgtgatatggcacaaggatatttgtttggaaagccaatgccaattgaagaatttgaacatttaattgtatccaacttggtaagagggtaattaatctgtaatataaagaatttaataaattgtgttaaaaatggactctaatgtagtgttcattttttttgtgaaattttttatacttttactaaaaagtaattgacatatactttgtattattatattattgtattaataaattaatacaataatataataaggaggcatgaacatggaatgggaacttgataataacaaacctatatatatacaattagtagaacatttaaagttaaaaataatttcaggggaaattaaaataggatctaaattagaaacagtgagagcactagcagaagatgcggaagttaatccaaatacaatgcaaaaggctctaacagaacttgaaagacaaggtttagtttatagtcagagaactaaaggaagatttgtaacagatgataaggaaaaaataaaagctatgaaagaggaaatagctaatgtggagataaatacattaaaagtaaccttagaaaagcttggatatgatagagatgaaatgctaaaacttattacagaaaatctgaaaggagaattataaaatggataaaaatataagcaatgtttctcaagatggaatagttgaatttaaaggtgtaaacaagagttatggaactaagaatgttttaaaaaatattgatttaaatataccaaagggaaaaatagtcgggctgttagggcctaatggaagtggtaaaagtacaatgattaagctaatgaatggattattacagcctgataatggtgaaattatgataaatggaatgaaaccatccatagatactaaaaaaatagtttcatatttaccagaaagaacttatttaaatgattggatgaaggtatcagatttacttaagtttttctatgatttttatagtgattttgatgttagaagagcaaatgagatgattaaaagcttagatattgatgtaaatgaaaagctaaagacaatgtctaaaggaactaaagaaaaagttcaacttattttagtaatgtcaagaaatgcgagcatatatatattggatgaacctataggtggtgttgacccagctgcaaggtcatatatacttaagactatattaaaaaattattctgaagatagtactttactgattgctacccacttaataagtgaaatagaaaacatatgtgatgagataatattcatatcaaaaggagaaatagtgttacaaggagacgttgaagcaataagagaagaaaaaggaaaatctatagatgcattatttagggaggaatttaaatgttaggtaaattattaaaatatgagttaaaagcaagtggaagaatatttataccgttatatatagccatattgatagtagctgtatttaatggaatatttatgaatacaaatatacttcaggtacagggaataggaatactagtattaacaagtctttttatggcattaggagttttaactattgtagttacaattcaaaggtttagaaaaaatcttttgggggatgaaggttatttaatgtttactcttcctgttagcactagttcacttatattatctaaatgtataacagcacttatatacgctgtacttagttttatagttgcagtattcacttttggagttcttatgctttttggtacttctggaattttactacctgaaattttagatttgtttaacactagttttaaatggatttctgaaaactttttagatattttattattagtagtagtaatgtttatttcatattcatcatttattttgttattatatacatcaatctcaatgggacaattaccaaaattcaataaacatagaaacatagtggcatttgcttcttttatagctataaatatagtaatatcaattgttggagatgcagttggaagcatcttaccaaatgaagatacaaatatggtatatcatctttatcagagtcctagttttatgcttgcaatacttggtagtcttgtagttgcaatagcgttatttttcgctacaaaatttatattagataaaaaattaaatttagaataaatgtttttatatggagccatcttttgagtaatgttaaaagatggctcttattatttatgtagttaattcatgtatataatatgaatagtattttatttctagttaaatatatacatatgttgtataatgatattgcgtgtaaaaatttgtaagaataactatacactttatataagttatatcaagaaaatttaaaaatatatggatttgagggagaagatatgaaaagttatacaaaggctaagtggagtgtttggggtataattacattttcatttgttttagtattatttttaaggatgtcaactgctgttgtttcagacaatttagcaaatgagttaggttttaattctatacaaatttcaaatatagcatccttttgcctatatgcatatgcatttatgcaaatacctgcaggaattttgattgataaatatggagcaagaaaaattagcagtcttggaataataatggcaagtttagggtcaattttatttggtttgattcaaagtatagaattagcatatatttctcgtgtaattgtaggggcaggaacatcagtaatattactttgtattttaaaaattcaagggagatggtttaataagtcagaatttgcttctgcaacagctaaattttcatttgtaggaaatttaggtggagttcttgctacttttccacttgtgtttttgtctgaacttgttggttggagaaattcatttttattaatcggtataattggtgttgtaattggatgttttatatatattattgttagagatacaccaaaagagtatggattcaatgtagatactgaaccctatgaaaagtcagagaaggttaatattgttgatggtattaagtctgttataaagaacaaatcaacatggtataattcaatgataatgttctcttttgttggtcttacaagtgcatttataagcttgtggggagtaagatacataatggacgtttatggtgtgagtaagagtttttctgcgtttatagtatcattttttacatatggatttatatttggttcaataattatggattttgtatttgctaaaataaggtctagcaaatttaatataataaaatttggagcaatgatagatttgtttatatggattgtaattgtagttgtataccaggtaaaaccaccaattatagttttaccaatatcattctttattatgggatgtatagttatgtcacatctacaggtttttaatgatgccaagtataaaaataaagaaatttattctggactggcaactagtgttattaatacttttgaatttataggaagtggaattattaatttgattatagctatctctttacaagtaaattcatataatatagttgatggatataaaaaaggttttgtagtatttatagtactaagtattataactatagtatcatctcatataggggtaaaaaatgatgattgtaaggctatatagtgttttattaatagtttaatttagtattatattttgcatatatataacaaatagtttgcattttcctaagatgtataattggaatataaatcttgtttactatgtacaaatggtattgtattatattaaatagaaaataagaactttaaactataatattggttctaaaatataaggtaaggagttttttatggatacgacgaaaatagatgatataagcaagttagatttaaataatttagacattaataagatggatatgggaggtataatggaaagtctgctagaatgggctactacaagcggagtaaaacttataataggtatacttatactttctattggatttaaaataataaaaaaatttgtaaaccatgttatgttagtacttagtaaaagagatattgatttaactttaagaaggtttttgaagtctcttcttttgagtgtacttaaagttgccgttataatcattgttctggaatattggggaatgagtttgtccagttttgctgctgtgatagcatcagcaggggtagcaataggtttggctttacaaggtagtctatcaaattttgctggaggatttattatactattgattagaccttttaaagtaggagattacgtagaagcagcaggccatggaggaacggttgaacaaataggacttttttatacacaattggttactccagataataaacagatacttatacctaatggttctgtatcaaatgatagtctaataaactattcagcaaagaatactagacgagttgatttgacttttagtgtagggtatgaagatgatatactacatgttagaagagtacttaaagatattgttaataatcataaattaataataaatgagccagaaccatttataggagtagtagaacatggagataatgctgttaaatttgcaactagagtttggtgcaagacagaagattattggacaatttatcttgatttactagaagaggttaaagttaggtttgacgaagaaggaattacgattccatatcctaaaatggatttaacagtaaaagaattaaacaaaatttaattttttaatatagtgtttaaatttaagaatataatatagatatacttataaggtttgtaaaaaattaataagtactgttattttgtaagtaaaaatataaaagaatgggagtgtctcaaaatgaactttttagttcatgaggcactctttttgtacgaaataaaatatatttttattatttcaacaatgaaaaagatgcttgtttctattttgagacagtataatttttatgtaactttaattttagtaaatataaagttttaaaattgataaaataggaggaatttttaatataaaagggtaaataaagggtttagagggcataatatagaataaattaatatatttaaggaggatttttatgtgtaaaaaaacgtatttattagtggtaagtatacttatagcaggtttattaactgcatgtagtgggagcccaactaaggattcaggacaagcacaagataatacaaaaaaggaggcaaatgcttcaaataatgctttaaaagatgaaaaaaataatgaaaatttaatggaacaagattttaaagtgccatacacagatgcaataaacatatttaaagataaatacaaggatgctgatatagtagatttaagtcttgagagagatttaaataaatttgtttatactgtggaaggtgtagatgataataatgaatataagatgaaaattgatgctaatacaaaagatgtattagaagataaaacagaaaagttagattcagaagatttaaatggagttgctagaaaagaaaaattagatttaaatgacataattacacctcaacaagctatggaaattgcattaaaagaacaaaatggaatggttaaagaatggagtttagacaaagatttagatgttactttttataaaataagaatagataaagataaaaatgaatatgacataaaagtagattctaaaaagggaactgtattgaaggtagaaaaagaagattagaagatttaaactatctttaaaataatttcttttttgaataaattttgtttaaaatataacaagcagggtataaagagactaaataactattttaggaggagtacggtatgtcattgaaatcactaaaaataaaagaaaatttatattgggtaggttcacttgaccctgatttaagagtatttgacataattatgtatacaccttatggaactacttataattcatatgtattaaaaggaacagaaaaaacagttttgtttgagacagttaaagataagcattttgacaattatattgaaagattaaatgatttaaatatagattttgaaaaaatagactatattgttgtaagtcatactgaaccagaccatgcaggaagcgttgaaaagcttttggatttagctaaaaatgcaaaagtagtagcttcagaaacagcaattaaatatcttaaggaaatcgtaaacaaagactttgaatatgttgcagttacagatggagatacattatcaattggggacaaaactttagaatttttctctgtacctatgcttcattggccagatactatatacacatatataaaagaggataaaactcttgtaacatgtgattcatttggtagtcactatagtaatgataagatagtaaatacacttgatgaaaatgaagaaaaggattacttggatgctttaagatactattatgattgtataatgggtccatttaaaccatctatggtaactgctatagaaaagataaaagatttagatatagatactgtatgtccaggtcatggtccagtattaactgaaaatcctagaaaaattatagacctttattataactggagtgtaaaggaacaaataaagttagaaaaagaagttacaatttgttatgtttctgcacatggatatacaaagattatggcagaagctataaaagcatatattgaaaaaaatagcaactataaagtaaatttatttgatgtaatagagcataagcaagaagatattttggcaaaaatagcagtatcacaaggtgtattatttggaacaccaacaatattaggagatgcgttaaagcctatatgggatatattaatatcgttaaacccagttcttcatggtggaaaagttgcttcagtatttggttcatatggatggagtggagaaggtatagaaaatgctatggagagaataagtcagcttagaatgacagcagtaaaaccttttgctgttaactttaaaccatcaaatgaagagattgataaattacattcttatacaggtaaattcctagataagttaaattctacttttggaagtaaaaagaaaactaagaaatttaaatgtgtaatttgtaatgaagtttttgaaggtgatagtgctcctagtgtatgccctgtatgtggagctaaggaagaccaatttatagaagttgaagaagatgaagttacttttagaaaagatactgatgaatatttcgtaatagtaggaaatggagcagctggtttttatgcagcagatgctataagaaaaagaaataaaacttgtaagataactatgatttctaatgaagatgagttgacttactatagacctgcactttctgatggtataaatgaagaacttggttcagatttctacatggaagataaagattggtatgataaaaataatatagtagtaatattaggaacgaatgtagataaattagatgaagtgaataaaactattatagtgaatgatggagctattaaatttgataagcttgtaatagctacaggaagtagaaactttataccaccgattaagggccatgatttagaaaatgtgtttactcttagaaatataaaagatttatatagtgtaaaagaagcactagaaaaatctaagaaagttgtagtgattggtggcggtttattgggacttgaagctgcatgggaatttagactaaaaggattagaagtagtagtagttgaagccatggatagcatactatcaaaacaacttgataaagagggtagtaaaatattagaacaatgtgtaagagatacaggaatagatgtaagattgggtgtagcagttgatggtattgaaggtgatggaaaagctcaaaaagttgtatttaaagatggagatagtgttgactgtgatatggtagtattttcaattggtgtaagagcaaacactcaaatggttcaggatacatctgtaaaaattgatagaggtattgttgtagataagacattacagacaaatgttaaagatatatatgcttgtggagatgttgcacaagtgggaaatattagtttagcaatatggccatcttcagtagaaatgggaaaaatagcaggagcaaatgcaagtggagataatttgacatttgaaagtgaagtatatccagtttcattagatgcaatgaatgtaaaagtatttagtattggtaatatacaaaattttgataaagaaatttcatcaaaagatgaaggtcaaagaatatataaaaaattatttatgaaagatggttcattagttggagctatacttataaatgatttaagctgtactgttaaattgataagattaatatctgaaaaaggtgattttgaggatattatgaaggctgatatactataatttaaatacattaaaataaaaaggagttgtctcaaaattgatttttttctaatcaaattttaaattcaactccttttttgaatttttatataaaataacatggaaattttagtaatgtctgtggttacatacataggtttaattgttttttatatggattgtctctggtataataaattgaattgtgtttgactgatagatatttttattgaaagttaatacctgttatgcgataataaggacgtgttaggggagtttttataataacaattaatctcagtttttgtgttccaatagtagcatcaacacattctgatgtagtagttcttttcttataaaaattagttacaaatatgcttgtaattatttgatatgtaaatttaccaatattataaatgatgacctcgataataaggagagtgaaaaataatctatgaacgaaaatattttgattgtggatgatgaaaaagaaatagcagatttaattgaagtatatttaaaaaatgaaggttttacagtatacaagttttatacaggtaaggaagctctagaatgtattgaatctaaagatttggatatggctattttagatattatgcttcctgatattgatggatttcatatttgccagaaaattcgagaaaaatactattatcctatcattatgttaacagctaaaattgaagatatagacaagataatgggtttaaccataggtgctgatgattatataacaaagccatttaaccctttggaagttgttgcaagagtaaagacacaattaagaagatatatgcgatataataattcttatgaacaacagtcgataattgttaatgagtatgatattaaaggattgattatcaataaagaaacacataaatgtagtttatttgggaaagaagtagcattaacaccgattgaattttctattctttggtatttatgtgaacatcaaggaaaagtggttccttctgaagaattgtttgaagctgtatggggagaaaaatatcttgataataataacacagttatggctcatatagggcgattacgtgaaaaaattcatgaaccttctaaaaacccgaaatttataaaaactgtatggggagtaggttatacaattgaaaagtaaaaatattaaagtcaatcctgactttactcaagtgagaaataaaatttttatgagaacagctttaatggcatttatagccattattttcatatggattttatattcttttatattgtatggtaagttttctatctggatagtatcattctttgaaaatgcttttcgtatggaatataaagctgcattgaatttatatcagcagattttccgtaatagcatggagctcttcatgatactagctatggtgattgtgttttttataatattccgtgtttatttaaattggtttacaaaatattttagtgaaataaatcaaggtattgactctcttatcaaagaagatgttggagaagtggctttatctccagagttattggcaatagaaaagaaaataaactcaattaaacatatacttgaacaacgtaaatttgagacacaaatggcagaacaacgtaagaatgaacttattgtttatcttgcacatgatttaaaaacaccacttacatcagttatagggtatctgacactacttcgagatgaaagtcagatttctgaagaactgcgaaaaaaatatttatctatttcgttggataaggcagagcgtcttgaagatttaattaatgaattctttgaaattacaaggtttaatttatcaaatatatcacttgaatacagtacagtaagcttaactcgtatgcttgaacaactaacatatgagtttaaacctactttgatgagtaagaatttaaaatatacactgaatgttacaccaaatatgatgataaggtgtgatgttaataaaatgcaacgtgtatttgataacttattacgaaatgctgtttattatagttttgaagatactactattgaaataacagctgtacaggaggatgattatataaagcttaaatttataaatcatagcaatacgattccagaggaaaaacttgagcgtatttttgaacaattttacaggttggatacatctcgtaattcaaacagtggtagagctgggttgggacttgctatagctaaagaaatagtggagcttcataacgggacaataacagctcatagcgagaacaatataattacctttaaggttattattccgattgtaggaaatttgtaagaatttaagtataaaaaaataggaaattctttaggataaataaataaagagcactcttgttattgatataattactgtatcaaaacaagagtgcttttattttgatacagtaattatatcaatagaaaaatgtgaaaatatattatgtggaacagatgcaattgtaagtgaaggttgattggatttgaaatagaaaaagtattttaacatgtttctgtagattgtataaaaataaataaatcaacaaaggagaatcaaagatgaataataaaaaaattgcagttatatttggtggaaactcaacagaatatgatgtatcattacaatcagcttttgcagtacttgagaatttgaatacggaaaaatatgatattataccaattggaattacaagggagggtaattggtatcattatattggagattataataatatccagaataacacttggtttgaaagggatactgatataattccagttattgtttcgcagaaccgtgtcaaaaatggtattattgaatttttaattcctgatgctgtttctcagaatcatattccaaatagtgctattgaatcatgtgaaaatgatattaaatacactaaacttgattttgtatttcctgtattgcatggaaaaaatggagaagatggaacagtgcaggggttatttgaattggcaggtatacaggttattggatgtggtactctttcttcagcattatgtatggacaaagacaaatcacataaacttgttcattcagaaggtattaaagtaccaaaatcaatattactaaaatactcagataaatttaatgtggctgaactgtcaaaagacttaacttatccattatttataaaacctgtgcgtgcaggttcatcatttggtattagtaaaatttataaaaaagaagagttacaagtagcagtagacttggcttttgaacatgataatgaagtaataattgaggaaaatattgatggttttgaggtagggtgtgcagttttaggaaacgatgacttacttgttggaagagtagatgaaatagaattgtcaaaaggattttttgattatacagaaaaatatacattgaaaagttcaaaaattcatatgccagctagaattgatttggattgtgagaaaagaatacaagagacagcaaaaattatttatagaactcttggatgttctggatttgctagagtagatatgtttttaactccatctggtgaaattatttttaatgaagtcaatacaattcctggctttacttctcatagtcgttatccgaatatgatgaaaggtattggactgtcttttgaagaaatattggataagataattgaggtgtacataaaatgatgaataatattttattagataaaaataaagaagataaaatgacaaatactatcttattgactaaagataaagtttatgatgggaatctaattctagtaaatgcttttttaccagttaaaacatctgaagatatagatttaattcctgtagatacaaggtttccaagtattcttatgaaacgtgaagctacaaatattttacaaaatattttaaaaagtatatgtggaataaatgaaatagtacctgtaagtggatatcgtactgcagaggaacaacaagatatatattcaagctctctgcgtgacaatggaaaagactttactaaaaagtttgtagcacttccaaatcacagtgaacatcagacagggcttgctattgatttagggttgaagaaagaggttatagattttatctgccctgaatttccttataatggtatttgtaatgagttccgtaaggcagcactacattatggttttatagagcgttatcagtgtaaaaaagaagaaataacaggaatatctcaagaaccatggcattttcgttatgtcggatatccacattctgagattatcaataaaatgaatctcgcccttgaagaatatatagaatatattaagagattttcgtatacaaattgtttaaaaatagaagataaagaaaaaattatagaaatcttttatgtgcctattcatactaaagaagaagtgagaatctctatacctgaacaatgtgtatatcaaatatcgggtaacaataaggatggttttattgtgacattttggagaaatagaaaggactaagaaatggaggaacaagaatgattaggaataaatcttatgcagggcttgattattttaggattatagctgcattacttataattgcaattcatacatctccattattatcatatagtaaaatggctgactttgtgttaactagtataattgctcgtattgctgtgccattcttttttatgctatcaggcttttttctaatttcaacatataattataattgtaataaactgaaatcttttctaaaaaatgtattatttatttacgggatagctattgtaatttatattcccttaaatatttacactggatatttttccatgaataatttagtgcccaatattattaaggacattgtatttgatgggactttatatcatttatggtatctacctgcatcaattattggtgcaagtattgcatactttcttgtaaaaaaactaggtttaaagtactcattagtaatcactattgttatttatgtaattggtatgtttggtgatagttattatggttttttagaaaaaataccactattaaagaatttatatgggtatatttttgaagtatcagattatacacgaaatggtatattttttgcacctgtatttttcatacttggtggaataatatctaataaatctaattatatgtcaactaaaaatagcttgattggatttcttatatcattcttacttatgttatgtgagggaatgtttttacataaactaggggtacagcgtcatgatagcatgtatattatgttattgccatgtatgtatttcttatttacagccttaacatttttaaaaggttctcgagctaggttattgcgaacatcatcattaattatttatattatacatcctatgatgattgttgttattcgtatgttttctaaaatattcggaatacaaactgtcttggttgacaatagccttattcattatatagtggtaagtatagcatcttttatagcttctataattattatattgattcttaaacctctaaaaaaagacttgaaaggagaacataaggtaaataccaatagagcttggattgaaattgatttaaataatttggaacataatgtaaagatgatacaaaaagctatgccagaagattgtgaattgatggcagttgtaaaagctaatgcctatggtcatagtgcttttgaagtagcgacttgtgcaaaccaaataggtgtaaaagcatttgcagtagcaacaatagatgaggggattgatttacgtcgatatggaatactaggagaaatattgattcttggatatactaacccaataagggcaaaggaacttcataaatacaatcttacacagagtgttattgaccttaatcatgctatctctttaaacaaacagaaatacaacataaaatcacacattaaaattgatacaggtatgcacagactgggttttgatgttaatgatgtgaggtcaattttaaaggcatttaaattaaaatacttagatatatgtggcatatttacacacttgtgtgtttcagatagtctgaaagatgaagatgtagactttacaaataaacaaattgaatgtttttataagttaattgattttctgttaaaaaaaggtataaaaattcctaaagtacatattcaaagtagttatggtttttttaattatcccaatcttaagtgtaattatgtaagaattggaattgcattatacgggatattaagttctccaaatgatacgactaaattgcaacttgatttacgacctgttttatccttaaaatcacaagtaattcttattagaaaaatacaaaaagatgatagttttggatatggaagagtctttattgcaagcagagatagcgtaattgctatattatctattggctatgccgatggtatacctagaaatttatcctgtggaaaaagttacgtaataataaatggttgtagagcagcaatagtgggtcgaatttgcatggaccaacttgctgttgatattacagatatacctaatgtagaagttggtaatacggcaataataataggaagagataatttatctgaattatctgcttctgaagttgcaaataactcatgtagtatatcgaatgaattattgagcagagtaggaagaaggttaaatgttataaagaagtaactcaattaaatagtaatatttgttgtactgtgtaatttattttactctgactagacatttttagtaatattatgtctaatatatattttttataacttacatgacaatttaagttataaaaaggtgatgtttcagatttttattttgaaacatcaccttttttgttataatatataataaaataattataccttaactgtaaacttatatagattatttactttttaatattagattcattttttgagattggtatataataaacatatagagtatataataatagttaaagttaaaaaaggggaaaagcaatatgcagtatatacaagaattacttgatttgactcaaaattattgggtgttagccacaataatcggcttattaagtgcatttatagaaagctttataccagccttaccacttgttgctatagttacagcaaatgctgcaatacaaggattatttattggatgtttgttatcatggattggctcaggacttgggacaacttcattattcttattaataagcagatttaatgatagtaagctttttaataagttgagaaatagtaaaactgaaaaagcaataagttggatggataaacagggatttaagttattatttatagcgtatgcctgtccatttatgcctggttgtttagttactatcgcatcagcttttggtaaaaaagatttaaaagattttgtgccagcaatgttggcaggaaaatttgtaatgtttatagttataagttacgtggcaagtgatatagaaggttttataacaagtcctttaaagatagcatcatttatattattggtgtttttgtcatggaagattggaaatagagtaaataaaaatcttgaaaatcataattatgatttccatcataaaaaacatcacaatgataaagatgataaaatgatttagcttgtacgaaataaaacgtatcttaaaatgatttagtactaaattattttaagatacgttttattttttgtattaaggtacaaaatttttagttcttttgtaaactaaaatatataaaacttatttatacttagttcaaaatattgttatttattttttctacaactataataaaatataaaattgatatccaatcaaaaaaataactatgaaatttaatagcttagatatgaatttttctgtttttgagttagtttttataggtagtaaagaaatgtttatggtaatgggataaaacaattcaataccttctttagtaataaggtcaagacacaagtgagatagatatcctattataaacccactggacaaacatgagaaaactatattattgttagtgaagattgtcagagatttaaaaaaactataaataagtaataaggcaattagactgtgagtaaaccctctatgtctaaacctacttccaaataatttgtatattaacataaattttttacttatgtaagaacctctcatatctatatctggaaataaagaacctaaatatgcaaaataaatataaattataattaatactattttatatgcaatatcgtatttaactaggtacagattgtttataaaggggagtatcaaaagtgcgaatatataacctcccctttcatgtgtttcttttatcatataaaaatcctcctgaatcgtcactataaacattatattggtaaatttagactatcttttattatattatatagcaaacataagtttttttcaaaaggattttaatatttaattaatcttgagattttaaatttttgtaattttctaaagcaccattccaatttactacattaaaccagttgtcaatgtattcatttcttctattttgatattttaaatagtaagcatgctcccaaacatcaagtcctattataggagttaggtttttacttacagggctatcctgatttggagtagtcataatagataatttcccatctttagtagctacaagccaagcccaaccagaaccaaagacatctaaagcagatttttggaactcttgcttaaatttttcaaaagaaccaaagtctctatcaatagcttcttttaaagattcagaaggtatggttttttctggcgtcattatatcaaaaaagaatttatgattataagctccacctgcattatttcttacagttgtagcaatatctttaggtaaagaatctaaattttgcaataattcacataaagaataattataaagctcaggatatttttcaagagcagcatttaatttatcaacataagcttgataatgcttatcatgatgcagtttcattgtttctttatctatataaggttcaagtgcatcatatgcataaggtaatggtttaaccttaaatttgttattttcaggtgtaaaagcaaatgaagttatgcactgtgagattataaataaagacataataactggtattaatatttttttcttcataaaaatcacctcctaatatagtatttctagaaataaaaaaaatatgaaatattaacagataatttataagaatttaatagcaatttcattttaaattgaataagttttaaagccaaagacaaaactatgaaatatagaataagactaaaggacagaaaggaattttgattatatggacggcaatatttcaatttattataaaggtgatatatctaaaaaagaagatattaaatttaaaataaaagaatctgtaaataatacaagactttctagtagaatagagtataaggatgaggaaaaaacttttgattttgaaagatttaatgtaattgatgctatttatggaaataaaccatttgaaaaagatggaaaagttattgtttttaatggaaatatatataactatcatgaaataaaagaagaattaattaaaaaaggacacaattttactacaaatgatgatattgaagtcttattggcatcttatatagaatttggtaagaattgtgtacataagattaaaggaatgttcaactttataatctatgatagagaaaatgaaagtatatttggagcaagagatttatttgggataaaaccactttattatataaataaggaaaatgcaataattttttcctcagagtataagtttttacttgaatatatgaaaaatttaaatataaatgaaagaagcttacaaagttatttttcatttcaatatgtacttcctgaagatactatgatacaaggaataaggctgataccagcaggtcactattttagggtagaaaatggtatactatctttaaagagatataataaacttgagtttagaagtagtacaaaatttttttatactaaaaatcacttaggcaatagagatgtgaatgaggatgatataagaaatatagtagtagattcaatagtaactcatatggaagaggagaaagaaattggaacatttttgtctggtggaatagattcatctattataactactgtggcttcacaaattaatccaaatataaaatctttttctgcaggctttagtgtcaaaggatatagtgaattagaagtagcaaagaaaacagctgataagttaggtatagaaaatatccagattaatataacacaagatgaatatataaaatcattaccgaatgtaatttattctttggatgaccctatagcagacccttcagaagtaggtctttatttcttaattaaagaggcaggtaaacatgttaaagtagcattgtctggagaaggagcagatgaattatttggaggatataatatatataaagagtatagtactatgaaatcagttgtcaattcacctacttatattaaaagtatattaggaagagtttcagaacttatgccaaacataaaaggaagaaattatctttatagagctacaacaccattagaaaaaagatatataggaaatgcaaaagtttttgaaaacagcgaagtaaaaagattcttttttaagtataaggaaaagaatatatatgaatacctgttgtctaatttgtatagagatgcacaaaaaaataattacgattatataagtaaaatgcaacatatagatgtgaatacatggcttcaaggcgatatacttcaaaaaattagcaaactttctacagctgagcaggttgaacttagagtaccatttttatataaagatgtatttgatgtagcaaaaaatttaagaatggagcaaaaaataaataagaataatacaaaagttttacttagagaggcgtttagagaaatagtcccagaatatgttgttcaaaggaaaaaattaggatttccaactccaataagagtttggttaaaagattctctaggggatattgtaaaggaaactatttataattcaaatgtagatgaatttatagataaaaaatatgcaataaaacttttagatacgcatcttaaaggtcatagagataattcgagaaaaatatggactatatttacattttgtctatggcatcaattatttattgagcataaaaatgtcgagtattaatacttttttcaatattaatcagagggcaaaagcatgcaatgttttcaccctcttgattattatggaataggataagtagaattttgattgattagtttactatctcaataaaattattggcaaatattttgacaagattactttcaacagctaaatttaagttttgtccatcatcatatccagcggaaatcaatcctagtaagtttccaaacatatctaaaagagctcctcctgaactaccactagagattggagctgtaaattgtatcatttgaaccgtttcaaaatcacgaaaagctgagataattccatctgaaactgtattaaaaagacctaaagggcttccaattgcaactattttttgacctctcacaggttttttactgactttaacaggtattggtttgcattttctatcaacctttatcacagctaaatcataatctgaatggtattttataatttggtaagatgtataaactttatcatcattttcaaatctaactaaaaatgaatacccatcattgactacatgaagattcgtaagtatataaccttcattatttattactactccagaaccactcttaaacggtttattttcgttattgcacacaacaatcataacaacagaagctgataactttgcaaggtcttcataagaaagttctacttcctcatcttgtgcaatttttttagatgttagatttgtgttattaagtgtatttttagagttaggtttattcgtagtaggagaagtcttattggtattttcactgtaatttatatttgtaatatgcctttcaaaaggtatttctaatatatttggagttttcctagaaagttcaaatagagtagaaaattttgaacattcaggatataaatcaagaatatctttatttggatttatatataaaatatcacacccaagttgtgataaaaaatataagaaaaaaagttcttgccttttaatatttccaaagtatactatctttggtgaaatagtagtcttcaccttgttataaaataatttaggtagaaaatagtccatccaacacaaaagtttaactgcaaagtttttgatgatagaggatgtacaatttggcatacttgtggaaaataaatctaaagtatttttaaatgcaatctttttagtccaatttaaagtgtcattttctattttacatggaaagtcgatattatataaatcccaactgttaaacttagaactatcataaatattaaaaattttaagcatcttatctgtttgttctttgtcaaaatttatttttagattgtttaatctaatatagggaattgtaggattattaaaaaaataagtatctatatttttaactttttctatgtatttatcaattgaatcatcaacacctatatatcttgtaaagtggacttctttaatatatgaagaactcttatttttataggtagtatcagatataaattcaattagaggttcagttgacttttttattgaaatctttaatggtttaatagtacaaatcatattttttctcctataataagatgatataatctattataaaacaacttaaaacaatatagtacaataattttgtagtttcaaaataaaatatgtacttgtttatataaatgatatataattacatattaaacatagcttttatacatttaataaagtatgtaaaatctatgtaaaaagtaagaaatataaacatttttttaattatattttaaaaatatcaagcaagttttcttcacaaatgaataaaaaatgttataatatgattaaagaaaaagataaataattagcaagatttgtttagctaaaattaacaagggagcgataaattatgggtataacattatcaaaaggccaaaaggttgatttaactaaaggaaatccaggtcttaaaaatattttagtaggtttaggatgggatactaacaagtatgatggtggatttgactttgatttagatacagcagcatttttaacaggagcaagtggaagtgttactaatgatggagattttgtattttacaacaatttaaaacatacatctggagcagttgagcatctaggagataacagaactggcgaaggtgatggagatgatgaacaaatagttgttgatttatctaagattcctggagaaataagcaagatttcttttactgttacaattcatgatgcgacagaaagaagacaaaattttggacaagtaagtaattcttatataagaatagtagataaagacacaaatgaagagttaataaagtatgaattaggagaagattttagtatagaaacagctatagtagtagctgaaatatataagcacaatggagaatggaagtttaatgcactaggttctggttttgaaggtggtcttgctgcattatgtggaaactttggaataaacttataatttcaactataacaataaactaaagggggatattttccatggctatagtattaaaaaaaggacaaaaaatcgatttaactaagggaaatccaggtcttaaaaatataaaacttggactaggatgggatacaaattcatttgatagtggctatgattatgatttagatgtaagtgttttcatggttggagaatctcaaagagttgaaaaagatgaagattttatattctacaataacttaagacatccatctggagcagttgaacacttaggtgataatagaactggtgaaggtgatggagatgatgaggaaatattagtgaatttagagacaatgccaaagcatatacaaaagatagctgtaacagttacaatatatgaggctgctgaaagaagacaaaattttggacaagtaagcaactcatatataagagtattaaattctgaaaatgatgaagaaatattaagatatgacttaggtgaagaatttagtatagaaactgcaattacagtatgtgagatatataagtataatggagaatggaagtttagtgcagttggagcaggatttgaaggtggcttagaagcactttgtagaaactatggcttaaatgtttaatttaagcaatataatatattaaatataaataacctatacaaataatgtataggttatattatataaaattttgtggaggtttagtatgtcgattaatttatcaaaaggtgataaaatagatttaaaaaaatctaacccaggactgagtaacatacttgtaggtctaggatgggaccctgtgcaacaatctggaggaggtttttttaaatcgttatttggtggaggacaagctgatatagattgtgatgcatctgtatttatgcttaatcaagaaggtaaattaagtggaataaaagatttaatttattttggaaatctaaaaagtgcctgtaaatcagttttgcatacaggagacaatctaactggtgagggtacaggtgatgatgaacaaatcctagttaatttggataaagttccatcaaatattcataaattattgtttgtagtaaatatatacaattgtgtagatagaaaacaacactttggaatgatagaaaatgcctatataagagttgaagaccaaggtaataagaaagagatagcaaaatacaatctatctgataattattctgaaaaaactactcttatagtaggagctatatatagaaaagatggaagttggcaatttaaagcaattggtgaaggaacaaaagatgcgggtcttaaagaagtaatgcaaaatttagacaggattgagtgtgcatatggaatttaataatgatatcaaatattataatgtagataaagaagaagttacaaaagacttatctgttaatcctgaaaaaggtttatcagaatcagaagtcaagactagaagagaaaaatatggtttgaatgaatttactccaaaagaagagggtagtttttgggatgatttaaaagaaagtttaagtgaaccaatgatagttatcttgattattgcagcagtagtaagtgcagtaattggggaaactcatgatgcaatagggattgtaggtgctatagcaataggtatagcaataggtatgattacagaaggtcgttctaagaaagcagcagaggctctttctaagttgactgaaaacatagaagtaaaagtattgagagatggggaagtacatcaaatttctaagagtgaattggtaccaggtgatatagtatatattgaaactggtgacatggtacctgctgatggtagacttatagaaagtataaaccttaaaattagagaagatatgttaacaggagaatctgatgacgtatctaaaaagtgtgatgtagtagtttctatggaagagatagaatctaaaggagcagtagtagtacaggagccaatacctgcaaaacagataaatatggtgtttggtggtacacttgtagcttatggtagaggagctctagttgtaacttcaattggagataatagtgaaatgggtaaaattgctcaaaacttatcagaaacagatgagcaaactccacttcagataaaacttggaaatttaggtggtttgatagccaaagtttctagtgcagtagcaggattactatttatatttatggttttccaaatgataagtaagaatgtattaaatgtagatatgtctggaatattaccgtttttagaatcaatagacccagttaaaacagcatttacagtatgtgttgcgttgatagttgcagcagtgccagaaggtcttccaactatgataaatatgacacttgcaataacaatgcaaaaaatggctaaaataaatgcattggttaccaaaaaagaagcttgtgaaacgataggttctgtttctgtaatatgttcagataaaactggtacattaactgaaaatagaatgactgtagaagttgcatatgttgatggcagatatattgaaagttcagaagaggaaataaatagttattttgaagaaaactgtatgataaactctacagctgatgtagagcacaatgatggtgatattaagtatttaggaagtgctactgaatgtgcattgcttttatattacaaaaacgtagattatagacaagttagaaaaaattctaatatagtagctcaaaatccttttacttcagattcaaagagaatgacttctgttataggtcaagataatcatcatgtactattatcaaaaggagcaccagaagtcttacttgaattatgttcacatattcaaagaggaaaagacatagttccattaactgaaaatataaaacatgagattttagaagaaataaagaaattgcaaataaaatcaatgagaactttagggtttgcatataaagaaatctcacaagctgaagaagaagcagcagtaactgctgaaagtgatgctatgaatgtaagtgcaatggaaaataatttagtatttagtggttttgttggtataagagacccacttagaaaagatgttatagagtctgtaaatacagcaaataaagctggtgtttctgtaaaaatgcttacaggagataatataaatacggcaagagctataggtgaagagttaggcctattaaaaaataatatgagagtggttgaagcttcatatatagatactttagatgatgaagaattaaaacaagagatacaaagtatttcaatcgtggcaagaagtaaaccagatagtaaaatgagaatagtttcagctctgcaaaagagcggggatgttgttgcagtaacaggtgatggtataaatgatgctccagcactttcaaaagcagatgttggtatagcaatgggtatatctggtacagaggtatctaaaaacgcagcagacataattttaactgatgatagttttagtaccattgtaaaaggtattaaatggggtagaggaatttatgataacttccaaagattcgttcaattccaattaactgtaaatgtaattgcatttttagtggctataatatctcaagttatgggacaagagatgccatttactacaatacaattattatgggtaaacataattatggatggaccaccagcactagcattaggtttagagccagttagagaccatgtgttaaatagaaaacctgttgatagaaaagccaatataatttctaagtcaatggtgtatacaatagtattaaatgcattttatataacagcaatactaatgttacaatctacatttaatttcttaggagttgatgaagctcataagggaacagtaatgtttgcgttatttgcttttagcgcactgtttaatgcatttaactgtagagagtttaatgcagatagtatcttccctaattttacacataacaaattagcactacaaataatagtgttgacaggaattgcacaagtaatatttactcagctattccaagatttctttaactctgtagcaatggattttatgacatgggtaaaagttttatgtgtagcagcaagtgtaattgtggttaatgaagttgtaaaatgtataataagactggtaaaaccaaaaaagactgcttaaaacaaattttttagaagaaaacagactgactcaaaatatgaattttgggtcagttctgaataaacatttaaattgggaggatagttatgggtgactcaaaggtatttgaaaaaatattctccagccaatcagatagaggaaattacactccttcaaagggatatctaagttattttatttcgtatattggtttagaagatgaagttttgtacaatctcgagatatttaagacaaaacaaaatattgatagcaaaaaagatattgctttatttactgatgttatagcaaatcctagtgattttgatattataaattattttaaaagtggacttcaaaaatatagaactagcatggaagatgtagatataaatattttgggatttgaagagattgattataaaataaagcaagcaatggatagagtgttaaaagaagaggaaaaagaatttactaatgatagagttaaacaaaattttatagtgaaaataatggcatggataaaaatttatatcggtgctttagatataaataaaaatgaagctccaaaagtaatattttatggagatataaaaaaacatgaagtttatttactcttaatattatacttggcaggttttgatgttttatatcttaatccaaattcaaagagtaatatagatattttaaaatcagaaagatacaatatagagtttgaagaagccaacataatagaagaaaaaatttcttttgaagaaagggttattttaggggaaaaaatagataaaagttctgtaaaaaaagcttttactgttggggcagaagcatcaaagcgtataagtgaggaattgttaaatgatgcaggatttataaaaccttggcaactccaagatagaaaaataaaaaatctacttctaagttcaactgttgatgaaatatcaatatactggaatcaaccacttaaattaagaccaggatttaagtttaatgatgctattgtagaagctccaaattttctttctaagattaatggaatatataatgataagaatgaatatattaagtttttagatttattaagagattcggaaagttcaacatttattgaatttaatggagatgtagatagattttcaaaagcttttacgagagaagcttttagtttatcctttttattggattcaaaaggtgtaatagataaaaactctgttttaaataataaagattattccatatcaacactagcacttaatcaacaaattatgattttagagaaagtggaagagttgttagaaggaagtatgtttttgaatggtttaagtggagaagacaagataaaaggtctatttacagtacttcacatggataagaaatttgttcatatgatgaacaatttcgattactcacttataaacccaaaattgattatatacatgtacaagagtattgtatttgataaagaaatagtttttcttatgcttttacttagtaagattggatttgatattatcatattatgtccaggaggagaaaacaatatagagaatgttataaataaccaattgattgatatacacagattggataaaatggtatatgaccttaaattaaattcgcttgaaaatgatatacctttacttaaaaaaatttttggaaagaggagacgattttagatggggataaatataaatagtttttcaaaagataagaactctgtagaggttactgagaatttgcctacagcagttcaagaagaaaacttcgatataatggaatatacaaataataaaaaaaatgaactgagaaagtctaaggaagttgaggcattgacatcccttatagaagtagaaaatccagatacgattttacagtttggtaggaaagcatctgaaggagtagcaagagtttctgatagccttttaaatacaataaaattaaatagaaatgaagaaaattctaaaatgctggttcatttaactaaaataatggataagtttgatttagacgattttcaagaaactaaggaaccaaatttcgttcaaaaacttttcaaaaaagctaataatgccattgaaatgatgtttcaaaagtatgaaacattgggaggagaagttgagaaaattcaaattgagcttgagcaatacgaaagagatatagcactttctaataagcaaataggtgctatgttaaatgaaaactttgagttttataatgaacttcaaaaatatattgttgctggagaaatggcaatagaagaaatggataatgaaatactacctttctttaaacaaaaatcagagactagtggagaccaaatggatgttgtcaattatcaagaactattaaaagtttatgatatgttaaatcaaagagtctatgatttaagaatagcagaaaatatagctatccaaacaatacctatgcttagaggtatgcaacataataattatggtttaattagaaaaataaatagtgcatttgtcgtaactttaccagtatttaaacaatgtttatctcaagctatattacttaaaaagcaagaattacaagcaaaatctctaaaagcacttgatgacaaaactaatgaattattgcttagaaatgcacaaaatgtaagtactcaaagtgcacaaatagctagaatggctggaacaagttctgttcaaatagaaacattggaaaaaatgtacaatactatcaagtctggtatagatgaaactatgagaatagaagaaaacaatagagctttaattaaggataatacaaagagattggaagaattaaatacgactataatttataataagtagtattatattaagggctaatttgtataaagttggccctttctatgtatatgaggaggctagacattgaaatatttcgattatatctgcaaagatgatttggagagaatttttttgaaggagccagaagactttagtgctaagactgaaaaagatgtgttgaaatatgcactgggcgcttttttatacgttccagctactcaatataatatgatttataagagtattataggggatgttaagggagttagaccattagctatttgtttagaagatgctgttggagtaaatggagagttagaggctatagaaaatcttagattaattttaaaaaatattagcaatgaaagtataactaataaagatggaataccactaatttttgtaagaataaaagatgtggagcaactgttgagaattaaagagattataattaaaaatagtcattctataacaggaatattaattcctaaagcaaattcggagttgattgaaaattgtatagaagctttatattctatgaatcttcaagatatgtatgttattccaataatagagacaagagaatttatatataatgaaaaaaaagaacttagttttactaatttgtacaatgctattttaagacataagtcaagaatattaagcattagagtaggcataactgatatattagggatgtatggtataaggagagataaaaacttctctatatataataatttgatttgttcttcatttatattagatataatcacatatcttcaaagaccagagttagatatacctataagtggtggagtatcagaattttttgatatgacaaataaggatataagaaataagtatatagaagaaatattattggataaatatcatggattaattggaaagaccgtaattcatccaatgcaaattcaaattgtacaagcgctatctacagtatcatatgaagattttactgatgctttggatatactggatagtacagacagtaagtatggtgtgagcaagggtgtattaggagagagaatgaatgaaacaaatccacattttttatgggctaaaaaaacattgattctatctaaaatatatggtgtattaaataaaggagtagactatgaagaattgcttaaattttaattgtgagattgacattattgataatccattgaatttagaactaaatgattttttagacgtaggagtaagaaataatagcaaaagacgttttttgtttatctcaaagaaactcggtaaacatttagcatgtaagccaagtgagatggataatttgggaaaattaatggctacaatttataatgaaaaaaataaggaagaatcaaatggtactgttatagcttttgctgaaactggtacagctgttgggcatagtttttttgattacttatgtggagattatgaatttattcatactactagagagcagtttgacgagttagaaaatctggaatttttagaggaacattcccatgcaacagaccagaatttatactttggtatgcttaacaactttaaatttggagatgagataatattggttgatgatgagattaccacagccaatacatgcatgaatataattaggaaaattcaaagcatttatcctaaaaagaaatacactatatgctcaatactcaattgggtaagtgatgaaaatttaagtaaagttactcgtttagaaagagagctaaattgtaagatagattttgtatacttatttaaaggaaactttaaattttatatagatgaagatattatttcaaattacaacgataattatagtattactaaattagagactatttcaagtgataaagtaaatttagtagtaaatcatatttatgttgatttagaagattatattggaaataagaaatatgtaaaatatacaggaagatttggaattaatagaagagaacaatttagattaaaagaaatcgttaagagagaaagtaaaaaaataactatggccagtaaagaatctttaaaaaatgaaaaagaaaagattctatttttaggtactgaagaatttatgtatatacctatgctgtttgcaaaagaaaaagaaaatcaatatgatatatactatcattcaacaacaagaagtccaattattaatattgataagaagcattatcctattaaaagtaaatttatgctaaagagtttttataatatagatattcaaaattatatttacaatatagataaacataatttttctaagtgttatttatttgtagagctgaataaaagtgaaaattcttatctagaatttattgatataattaaaaaaacaagtataaaagaattaactatagtatgttgtagctaaagtgttttaacaggataaaatatatcacgattttaagataggagttgagtcatatgagagattttagcacgtattctaaagatgatgttatttttttattaaaagatatatcaaatttaattgaagaagaaggaaataaagaaagagaattaaaaatacaaaatggtagacattattcagaaatgataccaatagagtatgaagttagtgaagattatctgaatttatatcatgagaaactaagagaaaataaagataagcttgcattttctataggagttatgtgtgaaaaaataattaaaaaaaatggaaatgatgtagtactagtttcacttgctagagcaggaacacctattggtattttggcaaaaagatatataagaagcaagtataatgtaagtttacctcactatacaatctctataataagagataagggaatagatatgaatgcaattgaatatatagtaaagaatcatccgagctcaaaaattcaatttttagatggatggactggtaagggaactatatcaaaagaacttgaaaaagcatgtgatgaacttaatgttaaatttaaaaaacattttgactcaacacttgctgtattagctgaccctgctggatattcaggactttatggaattagagaagatttcttaataccaagtgcatgtttaaattcaaccgtttctggtttagtaagtagaactgtactaagagaggatttaattggtaaaaatgactttcatggagctaagttttatagacatttaaaagataaagatgaatctatgaactatatcgaaactatagaagaatgttttaaaaatcaatttaagaatatatctgatgaagttgaaaactgggaaagtgacattataacaagagatggatactttgatgttttaaatataaaagaaaagtataacataacagatattaactttatcaaaccaggtgtaggggaaacgacaagggttttacttagaagagttccgtataagattcttgttaaagacttaaatgataaatctttagaccatatattcatattagctaaggagaaaaatgttgaagttgaacaaatggatttaaaagcctataaatgttgtggaataataaaaaatatgaaagatatttaggaaatatattagacaggagaatattgaatgattgttttttcagatttagacaggagtatcatttactccaataaatttttaaatgctgatagtaaatatgctaatatagaaatttatagggaaaaagaaatatcttatatatctttagatactataaatttaataaagcaaatacaatattatggtatgtttatacctacaactactagaacagtggagcaatttaagcgtatagaatttaataaatatgggatttattttccttggagtataacttcaaatggaggagttatacttaaagataatgaaatattgaaatcatggagtgaaaaaatagataaactaaaacctgattatgagcccattgaaagtatgattcataaatttaaagactatttgaatgtagatggaataactaattttaaagttgcagaagatacatttttttatatagttgttgatttctcaagatttaatttggattcaatcaaagaatatacaaatatattggaatcaaaaaattggaagttttatgtgagtggcagaaaaatatattttataccaaaagaaatttcaaaagaaaatgctataaaatacttgactaaagaattaggaatagaatatttttatgcagttggagattctattatggactatggtatgcttaatatctcaaataaatcctatgtattgaagcatggtgatataaataaaaatgaaatagaaaattcatttatatcaagttctttcaaaggaatgagtggaactgaagagatattatctaacattttagacgagaactgcctacttaatatataatgactgatatataaataataaactagaaaaatctgaaataaattatagtaaagtttatcatactaatttatttcagatttttatcaatttatatttaagtaagaactcaatatgttaaaatgaaggtggagtcattgcccagactgagatacatacctcatcatcataattttcatacacatgtggtatagtactgttaaaataaaaactatctccttcctccaatagatattccttatttccaagtgttatcttcattttaccttttattatatagccacattcttctccttcgtgtgtcacaaattcactgtttttttgtgtatgaccatctagcgtaacaagtataaattctatttttttcccagataaattaggaacaagaagttcataaaattttgtagaatcattagttactattttttttcgattatttttctttactactatatcagagtcctctcttccaatctcttcaaaaaaataacctatatttatatcaagagcttttgatattttccacattgctacaatagatggaacaaccatattacgctcaatttgacttattaagcctgtacttaaatctgaattttttgctaaagtagagatacttatatttttagattttctaagagatctaattttgcttccgacatctatattcattagatacaaaccccctcagacatgattataacatataatttataaagattaataaaataaaaaaaagttttataatgcatgtattttttatgttatattgaattttctgaaaagatgcattataatagtattaatattcaatatattgaatattgataatgatattttaatttaatgaaatggaggtaattaagatgaagagttttgtaagtcctgataatatttgggtattatgggcagttgtaactggatgggcagcatttagtatttacttggaacaaaagtacaattgggcatcaaaagtgtcgggagcaataatagctcttgtaggagcaatgttattatcaaatctaaatattataccagtagagtctgttgtatatgaccaagtatggggatatgttgttcctttagccatagctttattgttatatcaatgtaatattaaaaagatatggaaagaaagtggaagattgctcattatatttcttgtaggttctgtaggaactgtacttggagctatgattggatttttagcattaaaaaatgtagtaccagatttaaatattgttgcagctatgatgacaggttcttatataggtggaaatgtaaactttgctgctatgtcaggggcgtttgatgcgccaggagaattagtatcagcaacagttgtagcagataatcttttaatggcattatatttctttgtcttaatagctataccatcaattggattttttagaaaacattttaaacatccacatgtagatgaaatggaaagtataggtataactgaaggagaaacagtagcagcaaattattggggaagaaaagaaatatctttaaaagatatagcaatagccattggtagcgcctttataattgtcgcagtatctgtagaactatcaacttggtttaaagctataataccattatcaaatccttttttagcaatgttaaatactttatttggaaatcaatatctaataataactactttgactatgttgtttgccacatttatgcctaatttctttggtgatataaaaggagcacaggaattgggtacatttttaatatatatattctttgttgtagtaggtgttcctgcttcaataacattaataattcaaaaatcaccattactacttttatactgcggaataatggtactaataaacatgctagttacatttatagttgcaaaaatatttaagtttagtttagaagaagctattcttgcatctaatgcaaatattggtggtcctacaacagcagcagctatggcaatatcaaaaggatggtctaagctagtagggccaatacttatagttggaacatttggatacatagttggtaattattttggtcttttagtaggaaatattttgatataattttacgtgaaaagaagttgttttttagaaagatttttatttaattggaggttgttatgattttcgatggacattcagatacttgggcagatgtaacaataagaaggcttaacggggaaaaagatgtatttagaagaatccatcttgataattttaaaagagcaaatatagaaggagctatttttgtaatatggatagacccaccatatgataaagagcctgaaaaaagagttaaacaaattataagctctataaaagatgaaattgaagatatgaaagatgttgtaaacatagtaaaaaaatattcagatatagataaaggtataagtgaaaacaaaataaatattttaattggtcttgaaggattaagccatattggaagaaatatagatttactagattatttttataaagaagttggtgcaagacatgcatcattaacttggaatgaacagaatgaacttgctacaggatgtttaggggatgaaaatcgtggtttaactgaaataggtaaaaaagcagtcaataaaatggaaaaattgggcatgatagtagatgtgtcacatttaaatgaaaaatcattttgggatttaatgtctgttgcaagtaagccagttatagcttctcattctaatgctaggagtttatgtgatgctaaaagaaatcttacagataatcaattaaaagaaatttcaaatacaggtggattagttggaataaatagttttagaggatttactaatagtaatcctaagaagcaagatttaatacatttggttgaccatatagactatatggtaaatcttataggtatagaacatgtatcttttggttttgattttagtgattacttagggaaagagactataggttcttttactggaaatgctagtgtgccaagtgtagatggtcttgaaagcacacatacagcacagaacatagtagtagagcttgaaaatagaggttataaaaagaaagatatagagttaatctctagtggtaatttttataggctctttaaagatatactaaaataatataataaagaacttaaatttataaaatagtatatttatacaataatatctacatatttaaattggcgttcataatttattaaattaaattttaatgttactagaagtttcaattctagtaacattttttatgttaaaaatagatatagatatatattgacaatgataattattattgataaactataaaagtgaaaatgataataattttcattttaattaataaaagatttttaaggagggagaatgaagaaaaggtatttagtcataggaataataattttgtcttatttttctttatttataggagctgaagatataaatataatgcatatatttgcaaaaaatcagcataagcttatgatatttatcatgagtagggtaccaagattaataagtatattgattgctggtgtaggaatgagcatagcaggtcttataatgcaacagataagtaagaataaatttgtatcacctacaacaggtgctacaatagatgcagctcaatttgggatagtaatatgtatgcttttagtaccaactgcctctatttttacaaagacaataatagcatttgtattttctcttgtagggacttttacgtttatgaaaataatagggaagttacaatttaaaaatataatctttgtaccattagtaggtataatgtttggaaatataataggttctatgacggattttatcgcgtataaatacgatttgagtcaaaatgttagttcttggatgcaaggtgacttttctatgatacttaaaggaaattatgagatattatatatcacaataccccttataatattagcatatatttatgcaaataaatttactgttgttggtatgggtatggattttgcgacaaacttaggtcttagttacaaaagaattgtcaatataggtctgataatagtagcacttgttacagtatgtgtagtcgttacagctggtaatatcccttttataggtctaatagttcccaatatcgtatccttgtatatgggtgataatataagagcaagcatatggtatactggtttacttggagcggtatttgtacttatatgtgatatttttggaagaattattatttatccatatgaaatatctataggacttacagttggagttataggaagtatactattcctttatttaatattaaggaggaatgtgaatgaagcttagtctcaatcaaaaaatttactttgtaagtatattactattcatatcaatagcactttttataatttatggaatagacatgaatcatttagaatatgcattatcacaaagaataccaaaaatatttgctatggtattaggtggaggatgtatagcatttactactgtagtgtttcaaacaattacaaacaatcaaatattaacaccaagtgtactaggtttagattcattgtatgtaatgattcaaactataatagtattcatatttggttcaagcagtagtctgattataaatgaaaattataattttattattaatgtagctatgatgattggagcttcattgttattatataagatgttatttgaaaaaaataaaaataatattttctttttaatcctagtaggtatgatatttggaaccttatttaaaagtgcaacaacatttattcaagtaatgatagacccgaatgaatttttagctttacaaactagtataatggcaagtttaaacaatataaacactaatgtattgttaatagcatttataataattattgccataataccttttatatatgatgaaataaagtatttagatgtattgtcgttaggtaaagaacaagcaattaatttaggtgtagattttgataaggcagttaaaaaaatgataatattaatagcaattttagtctcaatatcaacagcacttattggacctatgacatttttaggacttttacttgctaatataacaagagaaatttttaaaacatataagcatacatacttgatttcgggttctatgttgatagggatgattacattgataataggtcaattttttatacaacatgtatttaagtttgatacgactttaagtgtagtaataaattttataggaggaatttactttattcaattactattaaagggggcaaatagatgatagagataaaaaatatatttaaaagatataagaataaaaatgttgtagatgatgtctcttttagtatagaaaagggaaagataacatcttttataggaccaaatggagctggaaaaagtacagtactatcaatagttacaaggcttataggaggtgatggcggagaagtaataatagaaggaaaaagcttgactaattatagcaataaagaattagcaaaaaaaatagctattcttaaacaatctaacaatataactttaaagcttacaataagagaattagttggatttggaagatttccatatagtgaaggtaatctaactaaagaggatgaaaattatattgatgaagcaatagaatatatgaagttgactgatatacaacataagtatttagatgaattgagtggaggtcaaagacaaagagcttatatagcaatggtaatagctcaagatacagagtacatattacttgatgaaccactgaacaatttggatatgaaccattccgtacagatgatgaaggtacttagaagtctttgtgatgagttagataagactatagtattagtaatgcatgatataaattttgcatcatgttattcagataatatagttgcattaaaaaatggaaaagttgaaaaagtaggtcgtacagatgagatagtaaatgaaaaagttttagaagatatttatgagatgaattttaacattaagaatataaatggaaatcgaatctgtatttatttttaaaatattgtatatgaaaataagcttgctatatgattttttataaagtttttaaattaaaataaagattaataggagagaggaaaatattgatatgaataaaaaagcagcaatagtagcagcagtagctattataggattagtgacagtgtttgcattaggtggaagtaaaaagaatgaatcaaaaacatcagaaaattcaaataataccataaagataactcataacttgggagaaacagatgtaaaattaaatcctaaaaaagtagtagtatttgattattcggctttagatacaatggatgcattaggtgtagctgagaatttagtaggacttccaaaaacgagtttaccagcatctttagaaaaatataaggataagaagtatgcagatttaggaggtttaaaagaaccagatttagaaggtataaagtcggcaaatccagatttaattataataaatggaagacaagaagatttttatgaacaattgtcaaaaatagcaccaacaataagtacaagtaaagatgataagaagtacttagaatctgttaaaaataatatagacaaaatagcaaaaatatttggagtagaagaaaaagcaaatcaagaatttagtaaaattgaaaagaaaatagaaactttgaataaaaaagtaacagataaaaatttaaatgctttaactataatggtaaatgaaggtaatttaagtgtatttggtgaagaatcaagatttagtatattatacaatagttttggatttgaaaataaagataaaaatataaaagaatcaagtcatggacaaaatattacttttgaatatatagctaaacaaaatccagaagttatgttcgttatagatagaggaatagctactggtagtgatgtaaaagaaagctcaactgcaaaatctgttttgaacaatgatataataaaatctatggatgcatataagaatgataatataatatatttagattcaccaacatggtatgtaaatgatggtggtctaacatctttaaataaaatgatagatgatgcttcaaaagcggtaaattaataatccgatataatcaaaatgtattttttgtaaaatgattatcaaataaactaggagtttttaagaactcctagtttattttttgcataataaagatatagtttaaacaataatattatttataataagataaatctattcaaaatctaataaaatatgaagttatactagacaaaaagaataactcttaaatataattaagttatataataatatataattataatgatataattttaataggaggtttgtaattaaaaagtatataaattatattaatagtaataatctataagaacttatatattagaaaaaaatttttgtatatataaaggactctaaagatgaactatataaaacaaggtttatatattctaatagtatagaaaattttattgtaaacgcatgtatattattagaaaaaatagtttgaaggtattcaataaacataaaaaacaatataggggataaaggtgttttatgaagagatttttgaggagaattatcttagttttatttattttgttgatttttataagttttatttctattaaattaattcataatgttggagattatggaaaattgattaattatgttgggattgtttgtggagctagccaacgtctaactaaactagagatgaatcatcaaccaaatgatgaattaatagaatatattgatgaaatcctacaggagttgattacagggcatggagattatggtttagtaatcactgattgtaatgaatacaatgaggacttacttttattagaaaaaaagtgggaagatttaaatattgaaattaaaaaagtaagaatgaaagaacagaataaccagttattaagtataagtgaagagtttttttctcttgcaaatgatacagtgtttaaaatagaaaacttttctaaagaaaaaagtaattacttaatgactttaataataattatatctattataggtatattagcatgtatcatattgattttacaatatagtaaaaaaatggttagactggaaaaattaaatgtagatttaaaaaatattgcatataaagatgaactaacaggagtaaatactatagaaaaatttaaattggatgcaaatcaaaatatttgtataaataaggataagaaatttgctgtattctatattgattttgaaaactttaaatacattaatgatatatttggatatgattatggtgacatgatactgaaaagatatgctaatcttatgatgaatgacatagggaaatatgaaatatttgcaagagaaattgcagatagatttgttgcgttaagatgctatgtagataaggaagatttagtagtaagacaacgagatgtagacaatgaactaattaatataacaaatgaaattaaaaataaacatagtattactgttgtcagtggaatttgttgcattgaagatgtaaatgaaaaattaagtatagatggtttaataaatagagcaaattttgcacaaaaaactgttaagaataaaccaggtactaattatgctttttataatgacagtattcgtaaaaaaatgattgaagaaaatactatcaagagtagaatacatgaagctattgaaaaaagagaatttatagtttatttacagcctaaagttaatttacatagtcaaaaaataaattgtgcagaagctttagttcgttggcttactccggataaaggtattatatctccagcaatatttattccagtacttgagaagaatttttttattgccttagtagataagtatgtttttgaggaggtttgtaaatggattagaaagaggttagatgaaaataaaccttttgttcagatatcagttaatgtttcaagaatacaattttataacactaaatttgtagaaacttattccaatatacaaaataaatacaggatacctaaaaatactatagaaattgaatttacagagagtgttgcttttgagaatcaaaaacatcttttggaaattatacatgatttgcatgaaaatggatttacttgttctttagatgattttggaaaaggttattcgtctttaagtgttttaaaagatttaccatttgatgttttaaagcttgactctatgtttttcaaggctagtttagataaagataaagagaaaatagtaataaaaaatattgtacatatgttaaaagagcttaatatcacaactgttgctgagggcattgaatgcaaggaacaagttgaatttcttagggatattgggtgtgatttagttcagggatttgtattttataaaccaatgccaatattagaatttgaagaaatattggataaagagtttgtttataatagctaaaatgtactttataaaatatgaactaattaagtaaaattattttgtactgaataaatttttactttatttacagaatagtgattatttacagaaaagggcgaaaagtgtattcctttaagtatgggatggatagcacaaataggggagaaaaaatattggccatataagaatgcataataatataaatatttgaaaggtcagcattatataaaaattaaaaagaaaataaataatttttctataaaaaagagactatgagaaaagttactcatagtctcctaaataatgtatttattttcttcctgcaacccattttaagccccaatgaaattcagtatccatttctctatgacctttgaagtatttaactactttttcaacactgaatgtctcatcatttacattttctatcaatgctattgaacacatattatagccatttttatgttcatcaagtttgacaactaagtctgaatcttgtttttgtttgattgttacaattccatcagcttcagaccagttagctacaccttcgtatataaaagcataaataagtattctttttatatcttttattttattaccatttattcttaaattttctccttgtgtattacttcctgttctgtcatctccatctaattgagcaaaaggtggattgtctaaactaccaaaagcatttcctaatgcttgaacagcaccttttacaccatttttcatctcaaataggcaacccaaatctaaatctatattactgcttcttaaagagccaaaaaaaccctttttttgtactttttgattccaatttaaattaactaagatttcacctaaatcgctattttccttttttgtaaggtttattttttgtcccttttttaattctatagccatagtaatcttcctccacaaacatagatttatttaaatggtagcacttaataagtcaatattcaacaagattagaataataatattaaaactatactaaatatactaaaaagtaggaatcacaatacctttgtatttttcttcaattaagcttcttgctttatctgatgtaagaacatcttgtagaactttaatcttttcactgtctttatcttcagttctaaatgctaaaagatttgcatactcgtcatttataggagctgtataaattccgtttttcttggcatcaagaccagcaggtacagcataagtagtatctataaatgcagcagtaacatctggaagagaagatggaatttgagcaatatctaactctttgaattgtattccctttggattttctattatgtccttaggactaactaatccatcccctttaggtaacgttaaaagtccaatactttcaaggtatctaaggttcttagagcaagaagatgggttattgcttattgcaattgtatctccttttttaaattcatcaacagattttatcttataagagtaaagtattgctgggcatacatatagttttttaccagccattattttgtaacctttggccttaacagcttcttttagataaggttcatgttgaaatagatttgcatcaatttcaccattatttaaagcttcgtttggaagtatgtaatcatcaaagtttttaacttctaaagtatatcctttttctttaataagtggttttaattcttctaataactctcctcctggaactaaagtagcaccaacaacaatttttttatcatctttagctttagaacatccaaccacagctaaagttagtactagacataataacaaacataataattttttgaatttcatataaattccctcctgaatataattgattagttaaaaataaaataccattctttatcacactgcaaaataaaaataagcctgagtttaaactcaggctttaaaagctaatttagactcatctttcagtataatactgcaggatttagcaccaatgtatataaaaatatactggttgctgggtttcatagggccagtcccttcaccactctggataagaagtatcaatttttaattatgttataaatattatcatgattttttacgtctgtaaacataattttataaatattttaaaatctttaatgtattttatttaacacctaaaattccagaaactagaatatcagtatcagcacctaagaaatagtcatttatttcaatagaatccagagtatttctcaaagcattttcttcatgccttataccaataagtttattttctacaaatgcaacatcacattttccaaaaaaatctccaaaaaattttatactagttattatgcctttatcaacatttaaattaaactcaacatttccaccagaatattttaattcatttgaaagagtatattttggtgaattaccaaaattccaatcccaagtttcgtattttgatttagtaagcttttctatttgttttatatcatgctcattcaaacaataattagtattatcagtatttgttttagaaagataatccattatagcatctttaaattctaatatgtccatttttgaatgtaaatgttcacttatattggttacacgagattttacagattttattccttttccttcaaattttataggtttaacctttaatgcttttgagaggtcatttatttcagatgaaaataaaagagtaccatgatgcattactttgtttttgtagttgtattgagcatttccagaaaatttcttgccatctataagaaggtcatttcttccagaaaattcggcattgacatctagtgttttaagtaaatctattatgggctgagtgaatcttctgaaatcactaaaattattattgttacaagctataaatgtaaaatttatatttcccaaatcatgaaatacagctccaccaccagactgtctcctaacgacaggtatagaatattcttttatatattctaaatttatttcagaaagtgtgttttggttttttccaacaattatagaaggttcattcctccataaaataaataagtcttcatcaaaattttttagaagatattcttccattgctaaattaaaataagggtttgttttttcattataaattaataacattaaagtagttcctccatagaattgataaaatttttattatgaatacaattaattttataattcgacaataatataaaaactcctttaaattagaaattttaaaaactaccttgcaaagtttaaataaataatatatactcaaaatatgtttaataaaagtgaatagaagggtagaggcgcaataatctatcagtactaataaggagttaagcacagagagttattaggaaaggagatattgccgaagttttataatcgatgctttaagattatattgctgggggtacatagaaaatatgtacaactgtcacaggtttatttgtggtgagctatcatttaaggaattatattatatttatttttactattgttgatatattgtaatgtttaagccttgagtgtttaccactcaaggcttttttagttttattgtaacataataccctgtacagttcacaaaattaaaaggagagggagatttatatgaggaacaaaaaaattaatattatttttctgacgacaatcatgttcataatgtcaacagtaatggtttttgcagaagaagatatagacactattgcactagctaatgcagaaaaatttgggattttaactttaataccaccattagttgctataatacttgcatttataactaaaaacgtaataatttctttacttataggtattctttctggtagttttataattaaagctagtggtattaatgtttttgcgacatttatacaggcatttttagatttagtagatagagctttagtatctttagcagacccttggaatgcagggataatactacaggttttggcaattggaggagtaataaatcttgttgctaaaatgggaggagctaaagctatagctgaagcacttgctaaaagagcaaagtcagcaaaagggacacagcttataacatggtttttggggcttttagtattctttgatgattatgccaattcactaatagtaggtcctatgatgagacctgttgcagataaaatgaaaatatcaagagaaaagctagcatttataatagatgccacagcagcaccagttgctggtttagctataatatctacatggataggtcttgaggttggtttaatacatgatgcttttgaaagtataagtatagatgtagatgcatttggtatatttttaaatacaataccatttagattttacaatatattaatattagctttcattgtaatatcagcattattattaaaagaatttggtccaatgagaaaagctgagataaaatctagaagtagaaaaattagtatagaccttgatgaaggcgtagaagagttggatgatttagctccaaaaaatggagtaaaattgagtgtatggaatgctataatcccaataggaacattgataatagttgcattagcatcattttattatagtggatatacatctataatgggaggagacgataaggctctgatacaactatttacaaattctccatattcttttgaagcaataaaagaagcatttagtgcatctgatgcatctagagcattatttcagtctgcacttgttgcaagtttagttgctattataatggctgtagtaaaaaagatttttacaatatcagaagcaattgatgtttggatagatggaatgaaaagtttagtaatcactggtgtaatattaatacttgcatggtcattaagttcagtaataaaagagttaggtacagctaagtttttaatacacctattatcaggttcactaccaccattcttattaccaagtttaatatttggtttaggagcaataatatcttttgctactggaacagcttatggaacaatgggtatacttatgccacttgcaattccattagcatactcattaaatcctgatatgtcttatgtaatagtaagtactagtgcagttttaacaggtgcaatatttggagaccattgttctccaatttcagatacaacaatactttcttcaatgggagctggctgtaatcatatagaccatgttaacactcaaatgccatatgctatatttacagcagtaatcactattgtatttgggtatataccagctggacttggattgccaatatatatagtattaccagtggcaatagctgctatatttgtaggtattcaaataattggtaagaaagttgatgaagcggaaatagaacttgtagaataaagatataaataagtttcaccttttattatcactattttgttagtttttagataattttaaaaagttattgaaaataatggcgaaatatagtaaaataaaagagtgataagcggatgtggcggaattggcagacgcactagacttaggatctagcgccattggcgtgggggttcgactcccttcatccgcactttacagtacttaattgtactgaaaaaaactggggttgctggctttcggagtgggctatcccgtttttatttttttgtatatataatagattggcactttagtataaggtgctttttttataggcaaaaacagtacatttatttctgttttattatcattcatctattagaatatactttatttaagaatgtgttaataagcagtgttcacattcttgataaaatgtggaataatatgcctaccaataagcatttggtgtataagtaagagtatttatatagttgattgtgaaatgagtacaacaattctgtacagtataattggcattataattgtagcattgaatttaaagtttgcacagtcgctgattggaaaatttacaaagtggatgtcaaacatataaattttagtttattggacagttcaaggaatcagaaattggaattttatagtattaatattttatagtattaatataatgtataaaattttatagcaatgtatttcataagtataaagtgactagaattttaagaaatatacaaattctataaaaactaaataatttcaagtatattttaaaaatcttatttttcacaagtttaaaattgtaaacgatttcatcaagtctatgaatatacttttaacatgttatagtaaatctcaatataaatttacatttggttctttgtgtgttattttaataataaattaagtgaaaatgttattttacattaatatataatatctttgcataagagtgaataatataaaagagaaagaattgataataaaaacttaacaaaaaaattaatacataaaaaaaaataaatataatgtgttgacatttaattgaaatattcatacaataaaattgaaaataaatatttccaaatgagattagcgagagagtcctttatacgaaaaggcgccgaagaagaaatttaagaaatgccaatttttagagaagctttcaggcaaaaatatcgctaattgatgggactctggagagacttaagttaagatactataagtcaccgaagaagcaaaataatattaaattattaaatctttcaggtatacaaacagggatatataggctaggattattttccatgctgatatatcttttttttatgaaaaagtacaggaaataatatcaaagttacttaaatacagtaggtctaattttctagggagggttatatatgaatgaattgaaaagagtatctttgtacaatatacacaaagagcttggagcaaaacttgttgaatttgctggctgggaaatgcctttagaatatgagggtataaataaagagcatgagaaggttagaaaaagtgcaggtatatttgatgtatctcatatgggagaggtacagataaagggagcagagtcagaaaaatttatacaaaacctagttacaaatgatataagcacattaaagataaatgacattatatatacacctatgtgttatgaaaatggtggagtagttgatgatttattaatatataaatttggtgaagaagattatttattagtaataaatgcaggtaatatagataaagatgtagcatggataataaaacaaagtgaaggatacaatgtagatataaaaaatatatctagtgaagtgagtcaattagcaattcaaggacctaaagcagaagaaattcttcaaaaaatcacagatatagacttaaactcaataaaattttataagtcaattccatcaacaaaagtatgtggttgtccttgtttagtttcaagaacaggatatactggggaagatgggtttgagatatactgtaaaaataaatatgtagaaataatttggaatgaagttctaaaggttggaggagaagatatatgtccagctggtctaggttgtagggatactttgagatttgaagcagctctacctctatatggtcatgaaataaatgaacacatatctccaattgaaggtggtttatctatatttgtgaaaacaaataaagaatcatttattggtaaatcaattttatcaaaagaaaaagaaagtggagctaaaagaaagttagtaggatttgaaatgcaaggtaaaggaatgcctagaaatggatatgatataaggattggtgataaaacagttggatttgtaacaacaggatgtgcatctccaacgacaggaaaaattttaggtatgggaattatagattctgaatatgcaaaagtaggaaatgaaataggtatagcaatcagaaaaaaagttgttcctgctgtgatagttaagaaacctttttataaaaaacaatataaaaaagataatattatattaaacaaagaaaataaattttcatatatacctgctacaagtgaagataaatcaaaaatgttaaaagtagttggattaaattcggttgatgaattattttcagatataccagaagaagtaaaattaaaaagagatttaaatttggaaattggaaaatctgaattagaggtaagcaaaatagtaaaaagattgtcagaagaaaacttaagtttagaagacttgacttgttttcttggtgctggtgcatatgaccattatataccatcaattataaaacatataacttcaagatctgaattttatacagcatacactccatatcaagctgaaataagtcagggaactttacaagtagtttttgaatttcaatctatgattgcagaaattacaggtatggaaattgcaaatgcatcaatgtatgatggagcaactgctgcaatagaagcatgtataatggcaatgaatcagactagaaaaagtaaaatagtagtgtcaaaaactattcatcatgaaactttgtcagtattaagaacttacttacaatataaagattgtgagatagtagaaattgacttttgtaatgaatatgggactacagatatagaaaaattaaaagcttctgtagacaaggatacagcatgtgttcttatacaaactcctaatttctttggaattattgaagaaatggaagaaatagaaaagataactcatgaaaataaggctatgttaattatgagtgtagacccaatatcattaggagttttaaaaacaccaggtgagataggtgcagatattgttgttggagaagctcaatcacttggaaaccctcttaattttggaggtccttatgtaggatttttagctagcaaatctaaatatactagaaaaatgccaggaagaatagttgggcaaagtttagatgtagaaggtaaaattgcatatgtattaactttacaaactagagaacagcatgtaagaagagaaaaagcaacttctaatatatgttcaaatcaagctttaaatgctcttgtagcttcaatatatatggctactatgggtaaagaaggatttaaagaggttggtatgcagtctatgaaaaaagcacattatacttacaataagcttgtacaaactggaaaatataagccaatatttaaaggtaagtttttcaaagaatttgctgtacaaggaaatcttaatatagaaactataaatgataagctcttagaagaaaatatattaggtggttataatttagaatacaattatccagaattaaaaaattcaactttgctttgtgtgactgagaaaagaagcaaagaggaaatagataagttagttggaataatggagggattataatgaaagaatacaatagtttgttgatagatatatctaaaaaaggtaggaaagcatactcacttccaaagttagatatagatgatataaaaatagaagatatgattgaccaagatatggcaagacaaagtgagttgaatttgccagaagttggtgaattagaattagttagacattatacattattatcaaataaaaactttggagttgatacaggtttttatcctttgggttcttgtactatgaaatataatcctaaaataaatgaagatatggcagcacttccaaactttactggaatgcatccataccaatcttcggatacagctcaaggttctctttctttgatgtatgatttatcaagaagacttgcagaaattacaggtatggatgaagttacactacagccttcagcaggttctcatggtgagtttacagggcttatgattataaaagcatatcatgaaaatagaggtgaccataagagaactaaagtgataattccagattctgcacatggaacaaatccagcaagtgcagctatggcaaactttgatgtgattcaaatagcatctgataaaaatggagctgtagacataaatgcattaaaagaggttttgaatgatgaagtagcagctcttatgcttactaatccaagtactcttggtttatttgaaaaaaatataaaagaaatagctactcttgtacatgaagcaggaggacttttgtactatgatggtgcaaacatgaatgctattatggggataacaagacctggagatatggggtttgatgtggttcatcttaatcttcataagactttttcaactcctcatggaggtggaggtccaggagctggtcctgttggagttaaaaaagaattagtaccttttttaccaataccattaattgaaagaaaagaagataagtatgtactaaattatgatagagaaaaatctattgggaaaattaaaaatttctatggtaattttggagttcttgtaagagcttacacatatatactaactatgggaagggatggacttaaagaggctagtgaaatggcagttttaaatgctaattatataaaggaaagtataaaagatgattatattttgccaatagataccttgtgtaagcatgagtttgtattaggtggattgccaagaggagaggccaatataaaaactatcgatattgcaaaaagactactagattatggataccatcctccaacaatgtactttcctcttattataaatgaggcacttatgatagaacctacagaaagtgagagtatagagacattagatagttttatagaagctatgaaaagtgttgctaaagaggcaaaggaagaaccagaactattgaaaactgctccacataatactttggtcaaaagagtagatgatgcaagggcagtaaagaaacctatactaacatggtcacaaagataaataattaaaaagtagagatttaaagtataaagagaattaaatttgtaagaaaaagctatctaacttaatccagtttagatagcttttttgtatattagtatgtatggtattttctatataaagttttaaattatattagtgcttatatagaatattgatatgatgattatgtatagatattaataagaattgttgaatttatcttgccttaactttatttactcttttatcttaagaaaaacttaactaaaatatagcgaaattcataaaaatttaggaaatcttaagaattataatatttaaatctttagatttatattttattatataaactatagaataataaaatataaaaattgagaattttataatatatttgtagatttgagtataaaaaagtgctaagttgaaaggagtaaaatatggataaggttaatttagaaaggtatagttgtgatataaatgttggtttaaataaaaatcaacttcaaagtagaatagatgataatttaattaatgcatttgataatggaaaaaccaaaacatataaacaaatttttaaagacaatatatttacactttttaatctcataaatattgttttagtctgtttattagtttcagttggttcttttaaaaataccttatttatatttattgctgtaattaatactattataggagtaatacaagagataagagctaaaagattattggacaatctatctgttatagtttcaaataaggtatctgtcataagagaaaaagagaaaaaagagattgatgtacaagaattagtattagatgatattatgattttaaaaacaggtaatcaaatttgtgcagattcaaaagttttaaatggaaaattagaggtaaatgagtctttggttacaggtgaatctgatattattataaaaaataaagacgattttttatattctggaagttttgtagtttctggagaagcttttgtaagagttgaaaatataggaaaagataactatgcaaataagatagttaatgatgcaaagatttctaaaaaacataattctcaacttagaaattcattaaattcaatattaaaaattgtaggtataataataattcctttaggaattatattgtttgcaaaacagcattttggaaatggagattctatagctacatctgtagtaggtacagtggcagctgtaaatggtatgataccagagggattaacattacttacgagcattgctctagctgtaggaactataaaacttgctagtcataaaactttagtgcaagaactgtactgtgtagagactcttgctagagttgatacactatgtcttgataagacaggtacaattacagaaggtaaaatgcaagttgatgatatagtaatgttggaagaagtggatattaatgaaataatggggaatatatgtaattctctcaaagatgataatgcaacactaaatgcaataagagataagtataatgttttagatacgtataaagctaagaatttaataccattttcttcagagagaaaatacagtggggttacctttgaaaataaaggtacatatttattaggtgcatttgagtttatatttaaggaaaaaaataaaaaaattagaatagaagttgaaaaatattctaaaaaaggaaacagagtaatagttttagctcatagtgattcttatatggaagataataatattcctgaagatataaagccactagcttttatattgatattagataaaattagagatgaagctaaggaaactttagaatttttttacaatgaaggtgtagatataaaaattatatctggtgacaatcctataacagtaagtgaggtagctagaaaagcaggtcttaaaacggctagtaattttattgatgcaacaacacttaaaaatgataacgatatatacgaagcagttgataaatacagtgtttttggaagggtaagcccacaacagaaaaaacaaatgattttagcattaaaaaaacaaaatcatacagtagctatgactggagatggtgtaaatgatgtgctagcgcttaaagaagcagattgcagcattgccatggcatctggaagtgatgttactaagaatgtttctaatttagtcttattagattcaaactttgcatcaatgccaaaggttgttatggaaggacgaaaggtaattaataacattcaaagagcatcttctttgtttttagtaaagacaattttttcattcttcttgtcactattaacattattcttcttcagtagacagtatccatttgttcctatacaattatcactaattggagctgtaacagtgggtataccatcattcttcttagctcttgaagcaaacaaaagtagaatttcaggaaactttttactcaatatattaaaaaatgctttaccaggagcactatgtgtgacagtaaatgtaattattgtttacaatatagttgaatatttaggctatagttcaagtgtattttctacaatgtgtgctatattaactggtgtatgtggtcttttaatattaagacaacaatgtttgccatttaataaagaaagattatttttaattgtaagtatgactattgcatttgttattgggattctatttttaggtggattattctcatttgtagcattgagtagagaattaattctcataactatggcattagcaatattaatgccaattatgataaaagttatgttatttgtcttggatgagatattagagacaattgttccagatttaaattaattttaaaatgatataaataagagcagttttagttgaactgctctttttagatgtgtttaattttatataagaatatgtatttttattaatcagctatatatgagcaacagtagtcaacaacttcattaacctttaaatcaaaacttgaatcactaggaacattaaatttttgcccttctttataagttacaaactcattgcttccaggcagttttacatccatacttccagcaagcatctccattatttcttcttctctagtagaaaaagtatattctcctggcaacattaatcctaaagtttttctttctccattaggcagtattattactctgctacttaccttaccatcaaaataaacgtttgccttctttactgcagtaacattcttaaattcactcattagataaaacctccaaaattatttgtacatatatattatataaaaataatgtaaaaaatgctatatatttgcaaaaaaaatttagtatttattaaaaaaattaataagaataaaaaagagatgaaattgcttaaattgataaaaaatataaaataaattgcaaagtaagcaagaaaagaataagttgaagagttatatattataaatattaaaaattttagtattaataaaaaagatattacattaatatgaaaatataggagattagaagtgtttgataattacagtttatatattataataaaataaattgttaattttaaaagaggtgaattttatggcacatatatgctttgaggatatttgttatttgttattaaaagaagcaatgaagttaaagttaataccacataataaaattgtattatttgaagatgatttatcaataggtaatatttttgatgtaaataactacgaattaagagaaaatatttttaagattagaaatgtttttgaaaataatccgaaactattattcaagccagatttgttagaagataggaaattatcaaaatgtagaaatataataatatggtgtgcaaataacccaaaagatttgtgtggagtatattatgtagtgagtaagtttcaagataaaaatataaagattgcattagtagatgaaaaaaagacagaagatgctctaattagatattcatttaccagtgaaatgtctccagaagattttccattctttttagataagacactagaaattggctttaatgaaaaactagaatttaaaaataaatgggatgtgttagttaaagaaaattctatttttagagcattagtaggtaacgaaattaaaagtgttgaagaaacttattttgataaatatatattaagaaatatcagtgacaaatggcaacctttaattgaagtggttgcaaactgtatgtttgaagatgaaatgcgtgtaaaagattggtttatactttggagattagagaagatggcaagtttaaaaatagtaaaaataaaaggaagtaaaggggatttttattctgataaggagataagaaaagtttaaaaattgaatttataataaattgtattaaataatgggtataactatgaagaaaaatatcttaacagtattaatattataattagcaataagtataatatttattctataatttgaaaatataataactaataccttacgaataagtgtgctaaataaaaaagaaatacttatttcagggatattagtatatattttaactacatttttacttaatagtattaaaatatggtgctatagagtaaataaactagaaaatttcaactttaatattacaatagtttattctaaatgccacttctttagatataggagatgaaaagcaagttttaattttttttaatcaatacatgttagatatatcattgtaaattaacataactttgaatataataatgttcagaaggcaatatttttgaggtatgaatccaataatatagtcttatgattgtagatatcaaaaaatataagttactaggaatacgttttgtagatttatatatgattaataactaaagctataaataaacaaaataaaaagagtatgtttcaacctatagcttttagatttaaaatatactcttttattaattatagttgcataaattaaccataatatataattaaaatttttattataattatatattaggttcttcaattagttttccacatacatatctatgaatgatatttctatcatcaccaacatagataaatctttcaagtctttcaagtatagaataattgtcatgatttaaatttgaatcatcaataatcaatgcatcaaaatcataaccttcttcaaagctaccaacttttccaaagaaacttccaccacttttggttgcaatataaaaagcctcagataaagataagaaattatacttcttaccagaattaacccaatataatttagataattgtattgcagataccattgctttaaatattgacaatgtatgtccaccgcttatatctgatccaagtgctaatctaatattattatcgattaattttctgataggcatagcaccactaccaacattaaagttagaagctggacagtgaactgccataacattgttttctctcattaaatctatttcatcctgagaacaatgaacacaatgagccattaaagtaggagtttgaccaaataaattatatctattatatgcatctccatagaatttagattcaggttctagacttctaacccattcaatctcatcataattttcagataagtgtgattgcataggaatattatattttaaacataaatctcctaaaccttttaaaagttcacttgtacagcttggtataaatctaggtgttattattggttttacaatagaatctgtatcactatacttatttataatttcttctgtatcagcaatagaatcctgagtgttttctaataaagtatcagggcaattcatattcatatttactttaccaacgtatgctccaagaccaacttctttgaatatatccataagtttcatagaggcttctttatgtactgttgcaaacactgctattcttgtagttccagatttccaaagttcttttacaaattttttatacatttttgttgcatattctatatctttataatttgactcttctggaaatgtataagtttcaagccatggcaaaagctctttatccatagccattccaagatttttaaattgagaggcatgggcatggaggtcattcataccaggtattataagcttatcagtgtaatctactacttttaggtttttgtattccttaggtatctctttaaatattccctttactttacctttttccagtataatataactattttcaaatactgtgaaagtttctgaagtttttgtaaaaattatatttccttttaatacttttaacatataggtctccttagttttaaatttgttttaatatatgtaggtaaaattttgttttacaaatcaaaattttaccacatgtattatatcaaatctaaactataaatactattagataatagcaaatattagtgaaatacagttgtttactattattatatataactgacacttaagtgacatttaagaaaaatataatgcttacttacataaaatggaatgttatttaaagagaactttgattatattttcaaaagcttttttatccatatcgtttaaaacaagaaaatatctattcatagttatttttatattagtatgtcctaatctttcagagatgatttttatattagttccagctagaagaagaattattagaatagataatatagtaagtatttacaaatatgtaggtgttcttaaattgataaattattccattttaattttatagtttgaattttatgatataataaaaatatataaattttgcagtgagcgatatttttgataaagtagggtttaacagttgcaatgtaagggattgagggtgtatgataaatgttatcaattgcactactcatggttcactgcaaatttgagagagttgtatgtgtgtaagtactgaaaatacttagtttattttggggttttatattaactatgtggtatgtaaatttaatttatctataatttaaaacggtgaattacatatgttttatattaactatgtggtatgtaaattaaagaggggtacttcgtacttttaccactcaaactagttttatattaactatgtggtatgtaaataggtcaagcatagattttgcaactggaagataagaagagttttatattaactatgtggtatgtaaatgttttagaacagaaaaaattgtataaattgtggaatggttttatattaactatgtggtatgtaaatttgtaaaatgtaaatagcatattaatttttctttcacgttttatattaactatgtggtatgtaaattggagcattatgtttttaggttacggagcaacatttagttttatattaactatgtggtatgtaaatggtgatagtggaagttttacttatacttggcgtgctggttttatattaactatgtggtatgtaaatttcagaatacttagctcctgcgcctatatcgtctgaatgttttatattaactatgtggtatgtaaataaagttttgcgcattgtatgtgtgcctagattatctgttttatattaactatgtggtatgtaaatatgtccccacatcaattttcctccgcatgaaaaaatcgttttatattaactatgtggtatgtaaattttagaaacaacagaataaacataatatataagcatagttttatattaactatgtggtatgtaaatctatatcgcatattcttttatctaggtcttcttttcgttttatattaactatgtggtatgtaaatataatcttgttatagactttactattgttgtaatagagttttatattaactatgtggtatgtaaatcttaccagaccctgcaacactaaatgacttacatagttttatattaactatgtggtatgtaaattcatcagtatttgtaaaatgctttaacttatcataatgttttatattaactatgtggtatgtaaatttttacttttcctttctatgtgtccaattcggacacattgttttatattaactatgaggtatgtaaatcttatacttagttagaactatatatcgacacaaatatgctttatattaactacatgatatataaattgcaatttttattcgttgtccaatcgcttgaaatttgttttatattaactacgtggtatgtaaatttgcaacaagtataggtaaaataccccaataatttatacagcattttctactttaaaatataattattttttatcatttgtagtaaataattaccagataacattgactttagttttaatgattaaaatataaaagtagaataattataaaaagtattgaaaagtttataaatatatataataaaacttaatgacaagatattagatataaaaaataattatcttataaatagattgaaatttatgaatattcatactataatttaaatataaagagatgtcctttaaaaataaaaattaaaaaatatttaatgctactacaataggaactagaactgcacttaataaatatacagaaattagatttggctcaatataaaatacaaatatagaatttaggtgttttttatgaaaaaaattttatatgctttatatagtttcattgttattatagctaattttagattaaaagaaaaaaattataactttattttattagcaatcttttttatactgctgttaattcaaaatggagttttaaaaacaggttatcaaaatagagctacattttatcaagataattattttaatggagaggataaaaatgataagataaaatttataactataaagatttttatatttttgtcattaccattatgttttaatatactattcaattatttaacttcttaaattatatttagatataggagtgttatgataaaagtaagattatgtgttgtttatattaaatataaagtgcatatagtgataaaacaaaagtttcatataaatgaagaaaaaatataaaataatttatttaactacttaaaaataaactaaaagggataataaaatagcttttaggttatggtaataaaggtatttaaaaagagtgcataagcactccaattgtgagaaatacatacacaaatcattattacaacaatgaaaaatgtacatataagagacgttttgtatttgttttaagtgataatattttaatactaactaaataattatcacaataataaaaaagaaaaaggagtattttgtactccatttgtcaaaaatataaaacttttatataagcttattataacataattgataaaagtgtaaagctatataatgaatttataaagaaaaataaaataaaaaagataaatcctaatcaaaggatttatctttttgtatagaaaataattattctattattaaatggcatggctaaactggataataatttattattactgctttcaatgttttttctccttgattatggtatgtatgaattgattcagctgaaaaacaaatagagtcattttctctaagttgataaatagagtcatttacttctaattttaattgaccttctataatcataatatattcctgtgatttttcagaatgaccaacagatgtataactatgaccttcttctaattccatttgaaataattcgaagtttctagttggtgtattgggataataacaataaagacgataatctttattttctgaaacttgtacatctatatcagtttttgatacaataaaagtttcattttgaggttgttccagtattgcagtatatggaacatttagtccacttgcaattttccaaattgtgtttactgttgggtttgagtctcccttttcaatttgcgaaagcattactttacttacgccagataattcagcaagttgacctagacttaagttacgttcattacgtaatctatttaaatttttagcaataacagtattaatactcatagtaactccttaaaatgtaaattattgacaaatataatttacgaatgtataatttatttaacattatttataatttacaaatgtataatataatgaacgttaaatacactgtacatccgtaatataaattatactgcataaagagttgtttttcaacggatgatagttgagagattaagggggaattgtaatgcgtgtacttaataatgttacagaggctataggcaatactcatatgttacatttatccaaaatagcagatgaatttggagttcaaggtaatatttatgcaaagatggaatacttaaatccgggatttagtaaaaaggaccgtgtagcattacaaatgattaccgaagcagaaaatgcaggtttattagttccaggtcaagcagttgtggaattaacaagtggtaatactggaacaggactagcaatagcttgtgcatgtaaaggatataaatttatagcgtgtatgtcaaaaggaaattctatggaaagagcaagaatgatgaaagctttaggtgctgaagtagttcttgtagaccaaatgcctaattcagttcacggacaggtatctggtgaagatttggcacttgtagaaattgaggctcaaaaaatagcaaaagaaagaaatgcatttagagcagaccaatttaatttagaagcttgtaatcatgcacatgaaaagtatacagcagaagaaatgtgggaacaattggatggaaatattgatgtatttgtagattttcttggaagtggtagtacttttgcaggatgttcaaaaacacttaaaaaacataattcttctatcaaatgttatgttgttgaacctgaaacagcagcaatttattcaggtaaagaaataactgaccaagggcataaaatacaaggtggaggatattctatggatttgccattagtagacaagaaacttattgatggttatattcaagttacagacgaggaggcaactgatgtagcaagaaaattagctaaattagaaggtgtatttgcaggattttcttcaggggcaaatgtgtgtgcagcaattaagttgttaaagagcagtgaaaaaggaaaaaatatagttttaactcttaatgatagtggtttaaaatatttaagtactgatttatatgaagaattgtaataatagcacaatagttatgcaatgttttttaaattaagtatatagatttaaattataaaaagtatctcaatgtgatttttgaaagttataaaagagatacttttttattttgtaaatatggagtatcctacttataagtattaagctatatagatattgatgattagctatgcaataaaaaagagtatgtgtttttgcatttatacatcataacttggaataatacatattaatgttctaaatgtatttaaaacatatgataaaattagaacaaacagatacaaggagataaacatgcaaaagagaattttaagaaattttatatttacgggtaaaaatattttaagtaaacttgtttttataataaaatataattttagtacattaattttatttgaattatttcataaaggattagccttattttttatatggccatctattagatatatatttgatattttaataaaaagtttacatatagtctacctaaatatggataattttataaaagttttgaccaatcccatgtcaatagttctgataatactatcagttataatactagctttttatgcattttttgaatttacctctgtaattatttgttttaataaatcgataaaatatgaaaaaatagggttatttgaactctttaaaatatcatttaagaactctataaaattgttatatcctaaaaatatactattatttatatttgtgatattaataattccattagtaaatacagttttaatttcagggtttataggaaaaatacaaataccagagtacatattagattatataaagtctgatataattttaaatataatctatatgatttttcttttaataatctatatttcggttattagatggatttttagcattcatgagataactttaaatacagaaaattttaaaagagcaagaaaagaaagtgttaatcttataaagagaaagattataagaacaattatttattcattaatattatctttagtagtagctattattggatatgcgatttatcatagtggaattatatttataggcatatggactaaatattgtactgatatggaatttttgaagaatgtatttataaatagatgtattgcatttgaagaatattttagattgattttatcaatattcatttttatattggacattggatttatctcagcaacttattatcaatataaaggagtaaatatttctaaaaataatattaaaaaagagaaaaaatctatatcaaaaattgtttttaatttagtattaatattattgatttcttatatagagtcagttgcattttcttcacatataaatggcatgtttaatacgtcattttcattttatacaacagcaattgctcatagagcaggagctgaaatggctccagagaatactttggcagcaatagaagaagcttcaaatgctaaagctgattatgcagaaatagatgttcaagaaactaaagatggagaacttattgtacttcatgattcaaactttaagagaactacaggagtagataaaaatgtttgggatgtaaattataatgaagtaaagacatatgatgcgggaagcttttattattatggaaaaggttattatgatgaaaagtttgttggggaaaagataccaacactcaaagaaatgataaaatattctaaaggtaaggtgaaattattaatagaaataaaacttaatggacatgaaaagggagacatagtaaaaaaagttgttcagttaattaaagaaaataattttgaaaatcaatgtatagttgcatctatggataaaactatattacaaaaagtaaaaaaactggatgagaatttactgacatgctattttatggcaattgcatatggtgatttttcaaagttaaattatgttgatatatatggaattgaatcaacttttgttaataaaacagtagtagaaaagattcataaaatgaacaaaaaaatcttcgtttggactgttaatagtgacagtttaattgagaaaatgcttgacctaaatgtagatagtattattacagataatccataccttatagagagtgcaatttattggaagaaaaatggatttattagtcaagtgtcagattatttattttaaatattctataattgtattatccagtaaaagagatattattaaaatcaataatatctctttttaacataaataaggttgttaaattaaggttattcttataaaaattgtgcttatcagctataaacaaggaataaaagtgaaaaaattgctctgagattattacagttaaaagagttttaagatgacagagagatagattgtcaactgtatatttaataaatcttgttatttattaaattttatataagtaaaatatataaattaataaatcttatgctagaatatatatgaaaaacaatataaatttggaggattaaaaacatgacagagcgagaaaaaatgttggcaggagaactttacgattgtggtgatattgagttgttaactcaatggcataaagcaaaagacctagtaagagattataaccaaacagattcctcggatttggaaaaaaaagaaaaaatattaaatgaattacttggtggtaaggataaaaacttatggattactgcaccgtattatgtagattatggaaataatatttattttggaaataattgtgaagtcaatatgaattgtacgtttttagatgataataaaattatcattggggataatgcactaatcgcaccaaacgtacaaatatatactgcatttcatccaactaatgctggtgatagatttggtaatgtcaaagaagatggttcatttgaattttgtaaaactcaaacagctccagttactattggagataatgtttggattggcgggggtgctattatcatgccaggtgttactattggagataatgtagttataggtgcaggaagtattgttacaaaagatattccaagtaatatgattgcatacggaaatccatgccgtattattcgagaaaacaaataaagttaaattttcttgcaaaatctcaaaaaacacctttcttactttatacatagggtattttccaatactttcacatccatattcatttgttaaatttttgtggaatgtagtttttatcacttctatcttacatttccaccattttttataaaagtcattcctttatagatttatttataatagtatatattctatttgatgtttgaataagcacttatttttaagtaaaatactaacttttaggttagtattttgctatagtatgatgattaagtaagaataaaatactataatacataaagcttaataaatataatttttattttacttagatattttcttttgattagtaatcaaaagtggttataatttttttaattaataagagtaatatttattttatgaaagaggattatattaatatatatttaaataggaaaaattgtaaaaagcataaaaataatataattaattaatgagataaaagtggataaaaatattgggagtttaatttttgtgaaattaaaaatattaaagctaatctacaaatatagaatatattctaagacgaattttcataattactaaataaaataaattaatcaatatagttttttaatataaacaaaaaataaaaaatttatataaataaaatgcttgtttttcttgtattatttatataaatattgaaatttgtctagttatacgtttttattgaccagttatgcagttgatattgaatattctaaatattggtgttattttataggtggtttaaacatattagggggattttatatatgatttgtatgatttatagagaatgtataaaatagtaaaggtttagagcatgtttagtggattgcagaatatgcatatagaatgattcttgtaaattaagttagacataggaaatatataatttgtattggatgattgattttatggtgtatgcttttaacttctataatgggaaagtaaagatgtactcccaatacatctttactttagcagaagttatagttacttataaagtacaaaaaattatatatttattagagtagataaatctaaaaaggtttttctagaaaaatttaattttaattgtatctacttactaataataagacttgatgtaagcaggtttcaactaccgtttctccatattctgatataaaatcatctaactgtgtatctaaaaaattacaataatcatatgaactactgatgtaagcagttagtatatgtgtacatttgtctatttctccaataaacatattatccatccccctaaaaaatttagtaaaaataaaaagtcgcattctattagtcaattaacataatttataaaattttttagtactagtttctataacttaactccttaaggttaaatattcccagttttaccaatttagttttattctacaagtatataatactagaagatgcttcattattcaacatgcttgtttgagaatagaaaatattctaaaattataattgtttttaaaaataagattcaagataaataaagttatatgcaactatttaataatctttccataataaggacagtaggttctattcttaaaaaactccatctttaaatttaaagaataactacaatttgaacaacaataaaatttccaatcaataaaaatatcaaaaataataaaaataattgaaaatgtataatttcccagaaaaataataaatgtaactccaataataaacacacctataaattataaaataatttaagctttatttaaggttagtattatatttatataagatttaagttttaatatatatgtgtaattaaaatgatttaggaggagaaatatattggtaaattgggaaataaaaaaattggctaaatctaagagtatgtttatatctctagggatattagtgttaatactaatgattagtatctttattacgcctgttttagaaacagaacgttattatatagataaagaaaaaggatgtatagaagatacgagaagtggtatcgacataggtaatgagaaatttcaaaataagattaatgttttaaagcagttttcaaatcaaacagatacaggtgaattttctaaaaaaattgaattaatgtcaaagaaaaaacttgataatctaagtgtgaatgaatataaggatattagtttttggaaagtatttaactatagagttacaaattcacttataaatgtaggaatgttaatcattatatctataattatatccaatatttacgtagatgaagtcgttacttcggtaaaagatatcatactatcatcaaaagagaagaaaaaagcattaaagtctaaaatatttgttgctttattagttccattagtaatttattctgtttatttaatgggaatatttattataacttgtatgcaacaaggagtacctgttaatggagacttagaatcttttagaatagtagacaatgtagttgcattgaaaactaatttaagtataacaaagtatgtaatattaaatataggcatagagcttttgatgtttgaaggatgggccatgatagccatatttgggtcttttataagtaaatcttcaatatcttcaataagtttttttatatttattatatctataactaagataatgtcggtaatccatatattacctaaaaaattactttcagttgtatcaaatgtaaattattatgatttgatatttggttttaataaaataataggaaattatctaggtgatattatgatatttaaagtgaatatagacattgtcaatatagcaataggacttttgatggcaatattgataggtgctatgtcattatgttttttagtaataaaatcagattatataagtagataaaaggggagttaagatgaataaattagaaatagaaaatctttcaaagatatatggtaaaaaagtagcaaacgacaagattacagtaactctggaaaatggagtttatggtcttctaggaccaaatggagcaggaaaatctacattaatgaaacaaataacaacgttgataaaacctgatgaaggtcagatactttataatggtgaggatatatttaaaatggatgctaattatagaaatattttaggatatttgccacaagaatttggagtttataaaaattttacagcaaaagaatttttacagtatattggagctttaaaaggtttaaggggaaaatatttaaatagtaagataggagaattattagatttagtaggtctttacgatgtgagaaataagtctataggaaaattttcaggaggtatgaagaggagagttgggatagcacaagttttactaaacgaccctaagataatagtctttgatgaaccaacagcaggtattgacccacaagaaagagctagatttaggaatttaatagcaaaaatgtctagagataagataataatactttctactcatataatttccgatatagaatcagttgcaaaggaaacaataatgattaaagatggcaaacttctaatgaaaggaacacacaaagacatattaagtcacatggaaaataaagtatataatgttcaagttaaaaatgaatgtgaagttgatgatatacaatctaaatataaggttgtaagtattcaaagtgatattgattcagtagtacttagaattgtttcagaggatattccaagtggggataatatacaaccagttcaagcaaaattcgaagatgtatacatgttttattttgatttggaagatgcaagggaggtgtagtagaaatgatgtatttagttaaagctgaaatgataaaaatattaaaatcaaagagtgtttggataatttggctgtttttaatatttttgggatttcttctgattagaaagtttgatgttttagatacttatgcagatatattttacaagatagaaggctcaatacctctaataggtttgataatgtttataataacttctggaaattacattaaagaatatgattctaatatgacaggtttaataaatacaactaaaaagggaaaaaaatcagtagtattatcaaaactagtagctaatggattaattttatctattattaatatttcttttatattgttagtaggaattagaggttttagtttttttgattttaaaaatttaaatgaaccgattcataacttatggtactttggaaatagtaatttaaatcttacagtaatacaaatgtatataattgttatattgactactatttttgcttcttttatatttgcacaaataggcttaacactttcatctatatttaaatcggctgtaattccatttatactaggtggattgataatggcaattccatactttagtgtaggttttataccagataaagctataaaatttatgtcagtgactccaaattggattatgatgagccaacaaatggttaggtataatgtaccaagtattttgatagttttttctatagtaatctcaattatattaatgatagtgttaactaaaataacatatgaaaattttacatcaagcaaaaggttttaactaaaaataatagtaattttatttatattttagtttaattaaaaataagataaatgaattttagataaaatatatgctaatatatatgtaaattattacaggaggttgtttatggaaaatcgtgttttaataatagatgatgaagtagaaatattgaagcttttagaaactgtcctaaaaaaagagggccttaataatatatatactgcaaaaactaaaaaagaaggattagaattatttaaaagtattaatcctgatttgattgtattggatattatgttaccagatggcgaaggttatgatatttgtaaagaaataagaaaaacctccaattctccaataatatttttatcagctaaaaccgaagaattagataagttacttggactagcgattggaggagatgattatgttacaaaaccttttagccctaaggaagtggcttttagagttaaagcgcatttgagaagattaagttattttagtgatgttcaaaacgaaagtaaaaatctaaataagaatgaagaaaaaattatatcatttggcccatatatattaaatgaaagtagggcagaacttataaaagatggaaaatctataggactgtctgcaaaggaactaaaaatcctatctttatttgcacataatcaaaatcaaattataagtaaagaaaaactatgggataaagtgtggggagaagattatgttggatttgacaatactataatggttcatataagaaaaattagggaaaaattagaggataatccttcaaagcctgaatatattctgacaataaaaggtcttggatataaattagcagtaaaggaagattagaatatgaagtggaagattactagaaattttatatttacaattgtgtttgtagctatatcagtagtaattataaatattatatctatattgtatgtgatttcaactaatagcttttttaaagttgtagattctggaaataatcctgaagaatttgcacgttcttttgaaaaagatttatatgaaaaagatggagaatttaaactatctaagattggagctgaaaaattagaaaaatcaaattcctggatacaggttttaaatgatttaggagaggaagtttatggagtaaatgtgccaaaggatactccaaaaaaatatacaccctttcaaatggtgaataattacaagtatatagaaacaaagtatgttaattttgtactagaaaaatatttaaacaaaaaacatctaaacataatagtaggtatacctagtagagatatatcaagaataattttaacctattctcaaaataacattaaaaaaactttaaataaagttatcattataacactagtaattgatagcgtggtagctttaggtgtaggatatttatttagtagaaaacttacaaaaccaatttcaagcgtactatggagtattgagactatggctaatggaaattatagtttatatcttaaggacagaggtatatatgaagaagtttttaaaaatataaatatgttagctgatactttaagagtaaatgaagttgagagaaaagaaaatgaagagttgagagaggaatggctggcaaatataacacatgatataaagacacctctagcatctatacaagggtatgcagagataattaatgacaaagattatgagtttgaagaagatgaaatacgagagtatacagaaattatatataataagtctaagtatataaaagatttagttgatgatttaaatttatctactcgattaaaaaataatactatagttctggacaagaaaaaaataaatttagtcagtttagtcagagatataataattgatattttaaatgataatagatataaaaataggaatattgaatttgaaagtaatgaagatttaattgaagtatatgtagattcaatcttattcagaagggctataaccaatcttatatttaattcaatagttcataatagcgaaggaactttgataagtgtagaaattgtaaaaaaagataatatagaaattataataaaagataatggaattggaataagcaaaagtgatttgaaacatatttttaaaaaatattatagaggtactaatacaggtgagatgcataaaggttcaggtcttggtatggctatttctaaagaaataatagagattcataaaggtaaaatttatgtaagtagtgaaattggaataggaacaaaaattattatagagataaaacaaaattaggagatatgatatggatttttttaaaaaaggtataagtgggtttactattaagattttagcattaatatttatgacatttgaccatatagcagcatttatgccacaaacaatgcaaataccaatttggtttcattgggtaggcagaatatcagcaccactgtttatattcatggctgttgaaggattttatcacactagtaacagaaaaaaatatataagtagattgtatatttggtctgttattatggctataggaaatcaaataattaataatgtattttcacatccagaaggagctataattataaataacattttttcaacattatttttaatagcgatttatttacaagcaatagagttcataaagaaatttagaaaagagaaagaaattaaatattttattataggattattgatgataatcattcctataattttaggaatatttacagtagctttactttttaaagtcactaacagagttattactttatttatgattttggtaccagtaccatttttagtagaaggtggaccaatttggattatacttgggattattttttatttgtgtagaggtaaaaagttcagtttgagtatttgttatgttttgatgtgtatatttatatttacaacaatgtcaaatggagattatagtttaaaaaattctattttacaaaattaccaatggatgatgattgcttctctacctttaatgttactttacaatggagaaaaagggaagagtatgaagtatttattttatttatactatccaatccatgtatatatattgtatatcttaggaatatacttaataaatggtttttgattgtaagtgatatttttaatacaaaatgaacaatatgaggattgttttaggtctattaaaattgttatttagatgagatttgtagaatatttaaatttatgagcagaaattcagttattgtaatttcaataacattagaatataatattataatttatttagaaatatatgatgttatatatggtttggttattaatgtaataataaaatagaggtttgatataaaattcaatacctctgttttagtgttttttatcctatatttatacttattttatttataaattagtgttttgttttaattaatattagtgcattttttatttattttataaaattagtcataattgtttcttcatattgtggttctttaattccagcttttttacctgctgatatacacttaagaagccatgccatgttttctcctagagttcgcatagtctgtaatccttcttcatctttcataacatcctctggagtaaagccatgtacctgattccaatactgtgatgatacaataggcatattgctgattgaaaaatatttatttagttggtcaaatgttgcacttgcaccaccacgtctacatgacacaactgaagcacctaattttgtagccatgcgacttccagctatgaaaaatagacggtcaagaaaagaagttaattgaccagttgcactagaaaagtaaacaggagaaccaataataataccatcaatattatcgagatcttcaatcaattcattaactttatcatttcgaatacattttccagtttcaaaacaggatgcgcaactaatacatcctgggattgcttctttacctaaatacagtatttctgttttaatatcgtgtttactcaatactttagtaatctcatttagtgctgtataagtacatccatattggtttgggctaccgtttatcaataaaactttcattataaatttcctccaatgaattttatttaatagattttctaagagatattattttttataaaataggattttcatgaatattatcaatttatatagaaatgtctaatcttagaatcctatttaaaataactctttttttagtaaatacacctcctattataaaattgactttcaattattcttacactataattttattataaattattctaaaaacaagtacgcacatttttgttcaatactaaccaaaaggagagtgtaatatatgagtatagactgtatatcaaatacagatttaagtgaaacaggatttagttatacactttcactgattagtggtaaatataaaatgataattctttactgtcttgtagaatttgaagttgtcagatataatgcattaaaacgttatataaatactatttcctataaaactttgagtttatcattaaaagaattagaagcagataacttgattattcgtactgaatatcctcaaatacctcctaaggtagaatatagtttatcagaaaggggaaaatctctgattccaattttagatgcaatgtgtgagtggggagagaggaatagaccttaattttgtatctgtagatgccataaaaagactgtgagtaaaattgtttgaataatctactcacagtctatatttaaattaatagttagtatttttaatttataaaatactaaaaaatttattatgaaatttcaccaccaatttcttttacatcttctttgtatataatacaagcttctatagctaattctaaaccttttactatttcttctaaagacatgaatggtgtattttttttatttattacctgtgaagttgtatatgggatgtgtataaatccaccctttatattaggatatttcttgtctatcatataaaggattccatacatcacatgattacaaacgaatgttcctgcagtgtttgaaacactagctggaattttattttcattcatatgttttaccatggcttttacaggtaattttgaaaaatatgcaggttcaccatcttcttttataatagtatctataacctggttaccttcattatcttttattctaaaatcatctatatttatagcaactctctcaggtgtaatgtcaaatctacctccagcttgtccaactgatattactatatctggattgtgctcttgaatagctttatctatagcttcaacagattttgtcataactgttggtatagttatctttatgatttctgcaccgtttatattattattgaccctttcaactgcttcttgagctgggtttattagttctcccccaaatgggtcaaatcctgttaacaaaattttcattattttacctcctaattatattaaaatcctaaaaagtacattactaatatgtgggctataattaataccaaagcaactggagcttgatattttataacaatataatcatttttacattctagcaaggctgctggaactatattaaaattagcagccattggagtaagtagagttccacaatatcctgctgttaatgctaatgctccaattatagcaggatttccaccttgagacaatacaaaaggaataccaattcctgccgttatgactgaaaatgcggcaaatgcatttcccattatcatggtaaatataaccatacctaatacataagctataacaccaaataatctgctatcagcagggactacaccagatatcatggttgaaataacttcgccgactccagcctgagtaaataaagctcctaatgcaactaaaagttgtggtaacatactagcaggtcccatttgttgaagtaatcttgagccatcttgaactgatgtagcaggttttgctttagttattataagggctgatattaatgcaattattgaacccacacctattgcaaattgagaagaattatcaaaattagaaaggctcatagctactactactgcagcaaatgctaatattaatgatggtataaatattttatttttaagtttgtctgcttgttcttttccaaaattttcatctggttcttcatactttgcaaatacaacttgtttagaaagtgttaataaactagataatattaatattattcctattatattggctggaatcaatctaccaaatatgaatggcagtgatataagtatccaaaataatgatgtaccatatttcttattgttatttatggtagtaaaagacttatatgctataacaatcattaaaaatcccattagtgcgtaaaagatttccaatgatatgtttataaaattttgcatttttattcctcctaaataaaactattttttatgacttttgtttaattttttatcatataaggtaaactggattgtagccactacaagtgctattactgccataatagtactagcctttacaatattaagtccagttacattgtatccaaattgagttagagtagatgctataagtaatactccactactacctgcaaataagttttgaccataaaaatttccatagttttctgatgcagcagataatgcctttatggcttcttcatccgattcttttagttcatcactattacttaaaccagcagcttgtgccataggattaacaagtggtcttacaaattgaggatgtccactcattcttattgatagagcaccagctatttgtctagctatcatgtatatagtaagtacttttcctgttgtaagtctttttaatttttctattaaagaaacagctctttgttttaaaccatatctttctaatacaccgattactggcagtgttaatatgaataatgatacacctctgtttgagacaaaagaatctcctaaaattgtaaaaatttgattaaaatctaatcctgcaacaattcctgttgccactcctgctaataatacagtaaataatgtgtcaattttaagtataaatccaattacaactatcaatataccgattagttttatcataaattgttctccttccatttctatatgttttaatttaaatttatttaatggataaagttaaactctttttatagtatttgcgttaataggactattattataaaatttaataaaaaatagggaagatgttttaaagtatcaaagtaaataatggttgtgtataggaatttgagtaacaaagattatattttaagctaatatgaattgattttgtaagtctatggtttaagtatatgtcaatatttgaaataggttttaaattagatattatattataaaaagagaatgtgtcaaacatagagacaagtgtatttttctcttttgaaatgataaaaatatatttgatttcatacaaaaagagagtgtctaatgaactttttagttcattagacactctctttttgttatgattaataaagcatatattaagagctagtttcattagatttcactaagaaaaataaaattttgataaagtttaaagactattttgagcaatattacttataaataaaagaatttatcatagaaataattagttttattttagctattaagatttattaaaaaattatctatattatcctgtgatattctaaaactgtcataattaccttttgaaacagccttcataataagtttatctaaaaatttcattttttctaatcgagcttcactaccaaaaattccaatagcatttgcactttctaataaggatgatggaaaatttgattttaaatatttatctgcttgttcagaaaagccacagcaaaggaaaatgccaacttgttttttgtttaataactctacattatcattacatagcacttgtattttttttgaaactgaaccaacatatatagaacttccaataataattttatcaaattttgataactcaattttattattattattaatatcaacaatagtgacattatctgatagtttattttttagtatatttgcacagtcttttgtacaaccatatttacttgaatatataataatagtattcataattattctccctttcttaaagcattttctacagcttttcgtatagtattactgctataagttgcagaagttatagcatccacatctaaagactgttgtttaataatacttgttgtaattttttcagcaggtttacctaaaagatggtcgtgttttaagatattaatattttggattttaccattattaacttcaacagacacagtagcttttaccaagttattatcagcacttccagtataaatgccatttttaacattattaatatctatatcttttactaccaagttttctggctttaagttgcttacaattacaataataatgcatataaatacaaagaatagagcaatagatatttttacatattttttctttttattagtagctttgttgcgaattttcattgtaaagtcctcccactaaaatatctaagaaattttctataagttgagaaaaattatgtaaagaatatagtttattttcaacaacacataaaacgaatcctaacaatgcacttataagcatccatgagcttttatctatattttttttgaatattccttgttcaattccaatggaaaggaatttatcaagcatttttataccattattgctaggagtattgtttgtattttcagatgcaaatataatattcattctactatgcatgatagcttttgccatctctggttcactagaaagagtttttataaagctagtcataatttctatgatttgtttatctattggtagtgatgagcaattattcataatgtcaatagcattactttctactgtgttataaagtttattggtcatatcgctgataatctctgctttgtccttgtagtaaagataaattgtagttggagaatattctatttttgtagcaatttttcttattgataaattttcatatccatgttggtttataatttcgatgctagcatccataatctttttcttcatttcttctttttcatttttacgtctttctttgatactcatataatcacctctttgcttaacggtgttaagttaatttacactgttattgtataatttaattttaatactgtcaataaattattaaataatataagttaatatatttttatggataataaattaatgttattaattgtaatatttaagatattattgtataataataatcggtttaaatgcgccacatcttattaaagttggttcataattctaaataaactttaataagatacattaaaatataataaattcttttatgctataaaatttattttatagctattaaatcagatgtttaaaaattttttaacagtctatagtttttaagagtctatagtaagtagcctaaaaatatgattttacatctgtacttgttcgagaactccaagtataaaaaactaaggaattatatagtggcagtatataattaatacccttagacacacctttttgaaagtggaaaaaagatgtgtagttctcctcgaccacaaatcaaggaggataaaaaatggaaaagagaaaagtaataattgattgtgacccaggaattgatgattctttggcaattcttctggctttaaactcaccagagctagaagtaattggaattaccacatgttgtggaaatgttccagcaaatataggtgcagaaaatgcactaaaaacacttcaaatgtgttcttcactaaatattccagtatatataggagaagaagcaccactaaaaagaaaacttgtaacagctcaagatacacatggagaagatggtattggagaaaacttttatcaaaaggttgtaggagctaaagcaaaaaatggagcagtggattttataataaatactttacataatcatgaaaaagtatcaataatagcacttgcaccacttacaaatatagctaaagcacttattaaagataagaaagcatttgaaaatctcgatgagtttgtatctatgggaggagcatttaggattcatggaaattgctctccagtagcagagtttaattattgggtagacccacatggagcagattatgtttacaagaatttatctaaaaaaatccacatggtaggtttagatgtaactagaaaaattgtacttactcctaatattattgagtttataaatagacttgataagaagatggcaaagtatataactgaaataactagattttatattgatttccattgggaacaggaaggaataattggctgtgtgataaatgaccctctagcagtagcgtactttatagacagaagtatatgtaaaggatttgaatcatatgtagaagttgtagaagatggaatagctatgggtcagtctatagtggattctttcaatttctataaaaaaaatcctaatgcaattgttctaaatgaagttgatgagaagaaatttatgtacatgtttttaaagaggctttttaaaggttatgaagacattatagactctgtggaaggagtgatatagtgtgaaaagaaaaatatgtgtaaaaactattacacttatagcttttggtatttctataaatataataggcgcttttatagctatgggattaagattacctgtatacttagattcaataggaactataatgatagcttcacttttaggacctaaatacgctgttgttacaggtgtgtttggaagtttaataagtggaattacgtttgatgtgtattctctctattttgcaccagttcaaatatcaaccggattacttgctggaatagcatttaaaaagaattttttaaggggtttaaaaactccactaggagtacttttatttgctattccaacatctataataagttcaataatttcagcatttttatttggaggtatgacctcttcaggttcatcctatatagtgcaaatcttgaaagtgttaggactgggagatgtttttagtgtgtttgtaacccaagtatttactgattatggagataagctgttagcagttgttttagtgaatttaggattaaatgcagttccaaaaactttaaaggtatcattgactggaggaaaatagatagaaaatggatagatatagtgagataacaaataaaaatcaaagagaaattgttctgcttaaaggatttccttgtatatggggaaagtgttctttttgtgattatatagatgataattctaatttagaagaagagatgaataaattaaatctaagggttttaaaaaatgtaactgggaaatatggagttcttgaagtcataaattctggaagctgttttgaattacctaaggatactttagaaaaaataaagtgtattataaaagagaagaatataaaaaaattatttttagaaagtcattggtcttacaaaaataggcttaaggaaatgagagagtattttgaaattcctgtggtatttaaaattggagttgaaacctttgacaatgattttagaaataatattttaaataaaaatgcaaattttaagactccacaagatgtaaaagaatattttgattcaccttgtattatgattggaataaaaggacaaacaaaagagatgatagataaagatatagagattatcctaaatacttttgaaaaagcgacagtgaatgtttttataaataattcttctagtataaaaagagatgaagagttagtgaaatggtttgttagtaagtataaattcttggatgaaaatccaaatatagaagttttatacaataatacagactttggtgtaggagattagcattaatttagtttaaatttaaaattgaaaagtttcttatgtttttgaaaaagcttctaatagttagaagctttttttgtagagttttatgttacaataagaaaaaaggaattaaggagcaattaaatgatgtttgataggggaaaatggaataaattggattataatgaacttttagaatatatgatgtctataaaagatataaaatatagagattttaataaaaagcttatacctggaacagaaaatataataggtattagagttcctaatttaagaaagttatcaaaagaaataagccaagggaattggaaggaatttttagaagtagcagaggatacatactatgaagaagttaggctacaaggtatggtaattggcaatataaatagtaattttgaagaaactttatactatgtaaaaagatttatacctaaaatcgataattggtcagtttgcgatgggttttgttctggtttaaagtctatgaaaaaatataaagaaaatatgtatgatatacttaaaaaatatgtttattcaaagaatccatgggaaattagatttgcattagttatgtttttaatatattatgttgatgataaacatattaaagaaatatttgaatactgtaataatatacaaagtgaagaatattatgttaaaatgggtatggcatggttgctatcaatttgttttattaaatgtgaagaggaaacttttctctatataaaaaataataatttagatgatttcacttataataaaatgctacaaaaaataattgaatcaaatagagtagatttagaaaagaagaatataataagaagtatgaaaagaaagacaagaagatgttgacggaggaatattaatgaataacaatgaagacagaattgacaaatttttagaacttcaaagcaaaggatttaaatttgcagagatagctcaaaatctaaagattagtcaaagtactttaagaacttttttaaataaaaaaggatataagtcagaaaaaggtaaatacatattaaaagacgaattaaattataataaaagtttggataatagaaacttggaagaagagaaagctaaggagtatgaaaaaagtaaaaagaatactataagtaatagaaaaaaagtaagcaccaaaaaaaagatttctaatgaaaaggctttaagtaaaagtgttgaacaaattgagtttaatgatacaggtttaaaaaatgcaaagcgaaaacaaaatgttaagcctaagaaagatagaaaaataaatataactcaagaagatttagataagctttgtgaagtatatgattggtatttagaagtaaaagattacaatataaagcctaaaaaagtatctaataaaaaagatgtacatatagatgatgaacacatagatgaattaaaaacaacaagaatacgtatagataaagaaatatggaatgattttgaaagattatgtagtaattcgaattttgaaaaacatcaaatacttacacaggcattgaaagaatttatgaaaaagtataaaaatctactataaaatactactatatgaggtgcttaatatgaataaaatagtaaaaaaatcaatttctctaatgattatattaacaatatttatttttatgttgacagcatgtgaaaaagatgaacagcctgattcagttgatattcaaacagaagataaaaatgagataaaaatagatgagggaaatgcaaaagtattgaatataggaaaatcagaaattataaatatagatgaaggtgataaagtagatacatcaacaaaggtagaaaataattcaacatttaatatatccaatgttgaattgatatataatgaatatgatgagaataaaaaaattatatcttcggatagtaaggctttgttggatatgactttaatgcctgggaaagttgcttacatagaatgtgggcataaaacttttgtaaagggtgtagaagtttatgcatatgaatatgaggcagagggtaagattgtgtatgttaatttaaaagaaaatactattaatataagaaataataatattaagctagaaaatagtagtcagtatgaggtgctatctacatcagaacttaaaaaagtaaatgaatcaaatgagggaattacgtatcaagtaaaagtaaaaaattcatcatcaaaagatttaggaaatattattcttaagacagcagaagttaatgaaaatggagaatatttaacagtaaatcgtgtaccatcatataagattttaaagccttcagaagagacagatatagatatattgtgttcaacaaaggcaaaaagtgttgaaatagtgggatatacgtatgatgatataaaagaaaaagccaatgtggatattgacttaaaatctcataaagttaagatagacaaataaaggtaggggatacttatgaaggttttaatagttgaagataataagatacttttagaaagtgtagtagaagaacttagcaagcattttgaaactgaaaagtgtgaagatggagaagaagctttatacttagtaaatcaaaatatatatgatttagttattttagacttaatgcttcctaatataaatggatttgatatcctaaagaaaatgagagttaataatatagatacacctgtacttatattgacagcaaaagaaacattagatgacaaagtagaagcatttactataggagctaatgattatttgacaaaacctttttatatggaagagttagtagctagggtatacgctatattaaggactaatggaaagataaaagaaagaaacggattagaatttaaatctttatatttagatacactagaaaaaagagtgtatattgaaaaagaagaaataaaacttcaaaacaaacagtttaacttgcttgagtattttgtattaaataaaggttcaattttattaaaagagcagatttatgatagaatatggggaattgattcagatgcaactattgaaatagtggaagtatatgtaagtaatctaagaaaaaagctaagtaaatatggatatgataaatatattaaaactaaacgtaaggtaggatatatattcgatgataaataagaatgtatttaccagtactaaaaatcatttaataaaaatgtatattattgtagtaggtagttttttaataatcttttctatatttatatactcatattttaggggacttacatatagtggaattgatagtgagataaatgatgaacttgaatatatagtctctcaatttaaaagaacttcatttttgaacccaataagactgaaagatcctaaagatatggtgtatgtatatgaagatggaaggataagttactatactcaaaatgaatattttgatgagttacttccagatagaagactagataaaaaaaattcgttttttaaatacacagaaaatggatatacttttagagaattaaatgtagatgtaggtagataccaaatacagataattagaaatatagattctgagatgaattctttaagacagcttacatctgttcttataattggaatattaatttctgtaataattacttactttgtggctgtatatctcactagaaaagctttaattccaatagaaacagcatggaaaaatcaagctaagtttatacaagatgcttctcatgaattaagaacaccaataacaatagtttcatcaaaattagaaagtatgttaaaatccccagaaagtacagtaaatgatgaagttgaaacaatagctactgcaatgaaggaaactagaagacttaaaaaaatgataactgatttattgtctcttactaaagaggactctattgttaaagttaatttagaagaaatagacttagaaaaattattggaagaaatatcagaagactatattgacattgctgagtttcaggaaaaaagattcgtgtttaattctaaactgaagaataaagttataataacagataaaaataaattaagacagcttatattaattttcattgataatgcctttaaatatacaaaattgggtgatgagatagcattagaattaaaagaagatatagaggatgaggtaactttacttataagtgacactggtataggcataaaaaaagaagagatacctcttatatttgatagattttttagaagtgaaaatgtaagaaataaagatttagaaggttctggaataggactttcaatagctcgcatgattagtttaaacttatctattgatataaatgtaacttctgatgtagatattggaactacatttgaattgtcaataccaaaaaagttaaaataataaaaatataaaaaattgtttttagaaatgaagaatgggtatactaattagtataaaatataaaaagaccttataaaagtaaatttatatttataaatttcatagtataattatatagggataataaagtttaataggaggatttaaaaatggcaaaagttataaatacatctgaatttagaagtagtgttgaaggtagtaagggagtagttgtagttgatttctttgcaacttggtgtggaccttgtaacatgttgggacctgtatttgcagaattaggtgaagagatgaaggataaagctagatttgtaaaagttgatatagatgagagcttagaaatagctcaacaattcaatgtatctacagtaccaactatgattatatttaaagatggaaaaccagtagaaactttaattggattcatgccaaagaacaaaattgaaatgcaagtaaaatcatatttataaaaaatgggtgagtattatgagatatgatatagctataatcggcagtggtccagctggattgtctgctgctataaatgcaaaaataagaaataaaacaattatcatgtttggtaatgataatttaagtaataagcttgttaaagctccttcaatagataattatttaggtttttatgatataagtggtgatgaattaaaagacaagtttaaatcacatatagatagtatggatatttcaattgaaaataaaagaataaataatatttatgctatgggagaatactttacaataatgtctggaaatgatatgtatgaagctactactgtaatccttgcaactggggtagagtatactagaccaatcaagggtgaagaagaatttctaggaagaggtgtaggctactgtgctacatgtgatgcaccactttatagaaataaaaaggtagcagttataggatataatgaagaatctaaagaagaagcaaattttttaagtgaactcacttcaaagacttattttatacctatgtacaaaaaagataatcttatgagaagttcagataacctagatgattctattgaagttatacatgacagaccagtacagatagatggagataaacttgtaaacaaagtatcttttaaagaaaaccacattgaagttgatggagtattcgttataaaagatagtacggctccaagtgcattggttcctggaatagagattgatggcattcatattaaagttgacaataatatgaagactagtatagatggatgctttgctgctggagattgtgttggaaaaccctattcttatataaaagcagctggtcaagggcaaatagcagctttaaatgctgtttactatttagataaattaaagagggcttaatatttatattgattaactttttaaagatatttataaaaaactgtcttgaaataattttattatttcaagacagttttttatttttaagttattaataaaagtattttaaaatctatatgtaattacttttattaataaaattcaaagttatattagtagaaattggaattatttataatatactccaaaatttaaaaataatggttgaaaaatctaattaagagtactataatttaattaagtaattacttaatcaaaacgaggtacttatggaaaacttggttaaaatatttaaagcattgagtgatgaaactagacttaacatacttatattagtatccaagagaaatatatgtcaaaaggggatttctaaatatctagggatttcagattctgctgtttcacaacatataaaaatattaaaagatgttgggataataacaggatataaagaaggatactatgttttatatcatattaataaagaatcatttaatatatgtgtagattttataaattctatgttaagtaattctagtgaaagctttatagatgtatttgatgtaaatacaatacatctaggatgcagtaaagaatgtaaatctataaaaaaatgttgtaagagaagggagaaataataatgaaagtatgtataccagtagaggagaataaaggattggatagtaaaccatatggacattttggttctgctccaatttttgttgtgtgtgatttagaaagtggagaagttaaatctttagataatggagatttagatcatgaacatggaaaatgtcaaccattaaaagcattgtcagggacagctgtagatgcagtagttgttggaggaataggacaaggagctataattaaattaaatggaatgggaataaaagtttacagagcagaaggtgatactataagtgctaatttagacttacttaaaaatggaaaattagtagagtttccatcagaccatacttgctcacatgacggatgtggacatcattaaaaaaaacagctgatgaaatatatacttcatcagctattttttcttttaataaatacgattttattcttttaaaaccaaaatttagatttttatgttttttgtagtatccttaataatatttcaagtttacaagtttactacttttagattttttttgtatgtttttctatatagtcaatatcatttaatatgtcattgagttctttattaagtgtttttaaatcatcaccatctacattgtagtttaaaaatagttcctctacattatcaatgatagaattgacttttctagtaacttcaacaaatgtcttaaagttactactatttttagcatttagaaatttttttaaatcctttgatataaatgatactatttcatattcatcattaaatagacctctaccaataggatatggttcaattctctgtaaaaaatattggtctttagcattaatattataagtataagatatttcccaaccgtctcctaaatcaaacttgataaaatataatgtactacttacttttgatattcttgtggcaccaagctgtcttaaaagaacttcaatcgaatcaccttgaacagtattaatattcatatatacacatcccctttagtattattatactatattttttaaaattttataattaaataaacagtagatataataatagatataatcataagtggaaaacctattttgaaatactccttaaaagagataggatgaccgtgtttattacctatacctgctagtacaacattagcagatgctcctattagtgttccatttcctccaagacaagctccaagagatgttgcccaccatagtggcattacatcaataccttcagcttgcatagtcaaaataagaggaattagtgttgcaacaaatggaatattatctaagaaagaagagactatagctgataaccataatatcaacaacattgtaaatacaagatgtccttctgtaagtccaatcaatgcttgagccaatttgtttattatcccaacttctactagtccaccaactactacaaataatcccataaagaataaaattgtggaccattcaatacctgccataatttcatctacatcttgttttcctattaaaagcattatagatgctcctgtcagtgctacaacagaagaatctatgtggattgtactgtgaaacataaaaccaaaaagtatgaatgctattaatataaggctttttataagtagaggtttatctttaacagattttttttcatctagttttaatattgcatttttagctctttcattcacaacaagttcttttccataaataaatctaaagcatattatagttatagcaagtattactataacagcaggacctaaatttattacaaaatccataaaactaagattggcagcactaccaatcataatatttggagggtctcctataagagtagctgttcctcctatatttgaagctaaaatctgtgttattaaaaatggaactggattaagtcctaatatttgtgtaataactatagtcattggtccaataagtaagacggttgtaacattatctaatacagctgataaaatagctgttataatagcaaaacaaatcattatcttccatgggtcacctttagctttctttgcagtccagatagctatatattcaaataaccctgagtttttgacaacagctacaaatagcatcataccaactaatacaccaatagtattgaaatctatatggcttaatccttcatcaagtgtaagtatattgaatattatcattaatagtgcaccaccaacagctgctacggatctgtttaccttttctgtaataatagctgccataactattaaaaatatacatatagctattatttgttgaaattccataatataagtacctccatttgtattattttgtgcctaatgctagtactatatatagtattacttttttattgttttttcaatggatgtatgaaagtatattatttaacaaagtttttgagaaattgacagaatttaaagaaaatttttgttatttaaataaattttaaaattattccattgataataatattaaacgacaaacgaaaaaatataccctttaaactagaatttattgtatccaataacaattataaaatattaaatatatctatattataaaaataataaaaaaaggtttgatttgaatataaaactgcaatatattaaaaaaattattcattttaaaccttgtaatttgattttataaatattataattaaattaatgaatttttaacaaggaattattcatttttttgattttaagatttattgagaaaacaaaactaaataggggggtaattaatataatgaattttttaaatggtattttaacgagtattaacaatgcagtagtatttgtaaacaattacttatggtcgtatatcttaattataatgttagttgtaattggtatttactttactattaaaacaaattttgtacaattcagatattttatagaaatgtttagacttctgggtgatggtacagcgaataaaaatgcaaaaaaggaaggaaaaatctcttcatttcaagcattttgtataagtacatcttcaagagttggaactggaaatatagctggaatagcaattgcagtggtagcagggggacctggtgctgtattttggatgtggcttatagcattaattggttctgcatcaagctttgttgagagtacattagctcagatttacaaagtgaaagatggtcaagcttttagaggtggaccagcgtattatatggaacaaggtctaaataaaaaatggatgggtattttattctcaatacttataactatatgttatggttttgtatttaatgcagttcaagcaaatactgtttcacttgcatttaataatgcatttggaataagtaaaatggctatgggaataggtcttggaattttaactgcaatagttatttttggtggagtgcatagagttgcaaaagtttctgaaataatagttcctgtatttgcaggattatatatattagttgctttggctatagttgtaatgaatataacagagataccaagtgttatagcattgatagttgaaagtgcatttgattttaaaggaatggcgattggtacatttatgggagttgtaatgactggagtgaagagaggtctattttctaatgaagcaggtatgggtagtgctcctaatgctgctgcaacagcacatgtaactcatcctgtaaaacaaggtttaattcaatctttaggtgtttttacagatactataataatatgtagttgtacagcattcatggtattattatattcaggttatagtagtagtggagcaactggaattgaattagctcaagaagctttaactcatcatataggaccagttggaaatatatttatagcagtttgtatattcttgtttgcatttagttctatagttggtaattactattatggtgaatcaaatatggagtttatgagtggaagtaagactaaacttaatgtatttagagtttttgttgtaggcatggttttatttggttcacttactcaagtagatgtagtttggaatcttgcagacttatttatggcattgatggcgataataaacttaatagcaatagcacttttaggaaaatatgcatttattgctttaaaagattatacaagtcaaaaaaaatcaggaataaaagaccctgtgtttattgcagatgaaatagaaggcctagaaaaggtatcagagtggcatagggaattatctgaggaacatttaggataaaaaatagtataaaattataaaaccattttgaaagactagagtatgtatatgctttatatgaatataatattgaattaatttatattactggaatttttaattccagtaatatttttttattatataatttagctttattaaaagtttttattattaaaaatagcttatttatcgtaaagtgaatgatattggttttttaattattatgaatgttggtatttaatttaaagacttaaataaatttgccatttctagcgcattcatagcacaatcataacctttatttccagcttttgtacctgctctttcaatagcttgttcaatattttctgtagttacgattccaaatataacaggtaattcactgtctaaagatacttttgctatccctttagagacttcactacatacataatcataatgagaagtagcccctcttataacacagcctaaacagattatagcatcatacctaccacttttagccattttttgagcaacaagaggaatctcaaaagctccaggtacccaaactatttctatattttctggagaaacgtcatgtcttaaaagacagtcttcagctcctgataaaagttttgatgttataaattcattaaaacgagaatttattatacctatttttaaatcttttccaataagttttccttcatatatcatttttatttcctccaattttatttatgttatagatttatatttataaatatctttaattttaattataaaaaactacttagtagaaaaatatcatcatataatcatttatataatatctaaaagatgtcccattttatcttttttagtttttaaatatagcttattaaagtcattaatttcttcattaatagggattctattttcgatttttattccatatttctctaattgatttattttatccgggttattacttaaaagatttatactttttatgtttaaattttttaatatttgagcagccatatagaaatctctcatatcttcttcaaatccaagcattaaatttgcttcaacagtatcgtaaccttcttcttgaagtttataagccttaattttatttaaaaggccaatacctctaccttcttgcttcatataaattaaaactccacttccattttccacaattttcttcatagaagattctagctgtaatccacaatcacattttagagagtggaacacatctcctgttaaacattcagaatgaagtctaactagagtattttctatatttatatttccataagtaagggcaatgtgttcttcatttgaataagtatctctatatcctatgatttcaaaatttccatattttgttggaaggaaagcactagatactttttctatagtagtttcatttattttgcggtattctataaggtcttttatagtgatgatttttaaattatgcttttctttgaaaatcattaaatcatcaactcttgccattgtaccatcatctttcattatttcacagataagaccaatctctttaaaacctgcaagtctagcaaggtctactgaggcttctgtatgtccatccctgacaagaactccaccagtttttgctattaaaggaaatatgtgaccaggcgttttgaaatctttacttgtagaattttcatcacagaacaattttacagtttcagctctttcatatgcagatataccagttagagtatctgctccatctatagtaacagtaaaggctgtttgaaatgtatctgtattttctctaaccataagaggtatattaagacttttaaattttttttcagtggcaggtagacaaattagacctctaccatatgtagccataaaatttattgattcaggagtagccatttcagctgccatcaataaatctccttcattctctctactttcatcatcaactacgattaccattttcccattttttatatcttcaatagcttcttcaatagtattaaacatgtaattcactcctttattatttttaaaaaccatttttaaataaaaaatctttatctatatttgatttatggttactactattagaatttaattccttgtagttattagccataaaattattaacatactttccaattacatcgctttctaaattaacaaaatctccaacattctttgtcaagagaatagtgttaattttagtatgaggtataatagaaaccttaaatatttcatcatctaaatatgatatagttaaacttacaccatcaatagcaacagaacctttgagtatcattgaagataaaagttttttatcaggtcgtatacttactaaaactgcattttcatctttttcaaatttgcagatagttcctttaccatcaacatgacctgttactatatgaccaccaaatcttgaagaaagactcatagctctttcaagatttaccttatcatttgcatttaataaacctaaatttgtggaacgaattgtctccatcataacatcggctgtaaattcattttttccgaggtttgaaacagttagacaaactccatttacggctatactatctccaagatttgtgccatctaatattttatttgatagtatggttacttttccactcttaccattagcagtaatttttctaagtattccaacttcttctactatgccagtaaacatcctaacctcctatatgaatgtattaacaaaaatttaatttaaaacatctgattctataagaatatcgccatctatcaaagttacattattgattgttaactgtgttgaatctgacaaatgatttattccttctccagaaacgaatgtaggtgcatctttaccacctataatcttgggtgatagaaataatttgactttatcaactaacttatttctaaagagactgtcattgagagtagcaccaccttcaactagaacagaatcaatgtttaactctcctaatttatacattacaaattccaaatctactaagttgttttttgaaggagaaattattgtttcaacattattttcttttaacatagataattttatactttctttgcaacatgtgaaaactatagttttactggttttatctttaaccaaattactattaagtggcaactttaggtgtgtatctattactattcttgtaggatgagacactttttcttgattgagcctgcaagttagtaaaggattatcgttcaaaactgtatttatgccaaccattatactttggtatttatttctgtatttatgagttagataccttgatgattcattagatatccattttgattctagtgattttgtagcaattttaccatctagacttactgctgattttacaatacaaagaggtcttttgttttttatatgataaaaaaatgcctcatttaaatctcttgcttcatcttctaatattcccacagtaacatcaatattgttatcttttaatttttttactccattaccacaaacaagtggatttgggtctaatgtagatattacaactctcttaatcttattttgtataattttatctacacaaggaggcgttttcccataatgagaacatggttctaagtttacataaagagtagagtcttttagactttgtttagcactgtttatagcatttacttcagcatgattagagccaaatttctcatgatatcctttgcctattatattactatctttaacaattacacacccaactaatggatttggatttacaaagccttctccatttttagccaattcaatagcttttttcatataataaatatctttttctttttgattcacaatatgtacacctcctgtttaattggataatttttaaacaaaaaaccctgagaattaactcagggtttagaataatctacaataaatgtttaataaaagtagaagaaaattgctctacaaaaacactcattaaatatcttcttccatccagactttactgtcggctttggaatttaaccaaatcaaccaagttttaccttggctcgcgggctataccgccgattgggaatttcaccctaccccgaagattaagtattaaatttatatttagaatgtatcataaattattttactttgcaaactatttttttaaaaaatatatgttaatatataatatagaatgtctataaactttgaaataccacgattgtgaatataaaaataaaaatttgaacataatcaggaaagaagtctaattaatttaaattaggagagtaatatatgaataaaaaacttttagaaatactatcaaaatactatggatatacaagttttagaaaaggtcaggaatctataataaattctatcttaagcgaaaaagatgtgttagctattatgccaacaggaggggggaaatcaatatgttatcaaattccagctttgattttagatggaatgacaatagtaatttctccacttatatcacttatgaaagaccaagtagatgccttaaagactatgggaattagtgctgcttttataaatagttcattaagcagcaaagaatttaatgaaatattaaataatattagaaaaaataattataaaatactctatattgctccagagagattagatgcacaagagtttattgagctaataaataataacaatgtaagtcaagttgcgatagatgaagcacattgtgtatctcaatgggggcatgattttaggttgagttatagaaggatttctgattttataaaaaatttgcctaaaagacctatagttacagcatttactgcaacagcttcagaagaggtaagaactgatataataaatttactgtgtttagaaaatccagattattatataactggatttgatagagagaatttatcaataaatatagtaaaatcatctagtaaaaataagtatattttagattatattcaaaatcataaaaatgagtctggaattatatatgttgcaactagaaaggaagttgaaaatatatataatggtttatctaagagaaatatatctgtatcaaaatatcatgcaggtttatctaaaaatgaaagaagtaaaaatcaagaagattttataaatgataatgtggatataatggtagcaacaaatgcatttggaatgggtattgataaacctaatataagatgggttatacattacaatatgcctcaaagtatagaaaactactatcaagaaataggtagagctggtagggatggagaaaaaagtgagtgtgtacttttattttctccaggagatgtacatatacaaaaatatttaattgatattggagttgaaaatcctgaaagaaaattatttcagcataagaagcttcaatacatgattgacttagtttacagtaattcatgctatagaaagacaatattgagttattttggagaaaattatatagacaattgcaataattgtagcaattgtttagtagagggtgaaatagtagataaaactatagatgcacaaaaagtcatttcatgtgtagctagaatgaaaagaagttatggtgttactactattgtagatgtacttagaggttctaagaataaaaagattttacagcttggattaaatactttgtctacatataacattatgagagattattctagtgaagacttaaagaattttgtaaatacattggtttctcatggttttttagatttagttgagactctaggcaatggaaatagaggtagttttcctactataagattaaatgagatgtctatgaaagttttaaaaggtgaagtgaaagtagagtttaaagaaattgttatgacaaaatcattggaagtagaggatgagttatataatgctttaagagaacttagacattcaattgcaagtgaagaaaggatagctccatatatggtatttggagatggtacacttagagccatgtctagtagttatccaattaataaagaagaaatgctagatatctctggagtaggagaaattaaatatcaaaaatatggtagagattttgaagcagtaattaaagaatatgtcgaaaaaaataatataaataaaaaaatagatgaaaaaaatgtcgatttaaagaacgttaatagtgatttcttagaggttaatacagataaagttttatatgaaaaactgttagtcattagagaagaatatgcaacaaaggaaaaattacctgcatatatgattttagccaataaggctttgaaagaaataagtggaagatatccacttgatgaagaacaattaaaagatatttctggcataggtggagtaaaatttgaaaaatatggagctaatattttggcagaggttaataaatatgtaaaagaaaataatattaatgttatttgggagaaaaagggcaaaaggaagttaatattagatggagaaagtagaaaaaataatgaaatagcattagatttgctaaatcaaggaaaagatatacaaagtatcagtcaagaaatagaagtttcattgtcaaccattattggatatgtgcatgactatgtaaaggatggacatagtatatcatttgaattaggactagaaaatttttataatgaagataaaaagaagatgattttagaagtttgcgaaaaagttggctatgataatttaaataacataaaaagaaaacttccagattcaataaagtatgaaaatataagagctgtgatgcttgactcttatcttgaaaacttaaaaaataatattatagcagagtaatttttaacttaataaaaataaaatttgtattattgtgttgaactaataattttgctgtgttatactgaatttgtaaaaataatgaaaaattagagctaggggcgctagaattggctagctgagagataaagccgtaacttacaaaccctaataacctgatcaagataatgcttgcgaagggaagctttttaatataattttattatataaataggcaaattattcaatgttaggagaaatttgtctaagtgtatatacgattataagagtgctttccaaacgaggaaaagcactttttttattttcaaaaactataactttaatcttggaggattgtaatatgaactatacaacacaaatggatgctgctagaaaaggcataataactaaagaaatggaaatcgtttctcaaaaagaacaggtagatgtaaatgaattaagagaattaatagcaaatggacaagttgttataccagctaataaaaatcataaatctttaagtgcagaaggtgtaggtaaaaatttaagaacaaaaataaatgtaaatctaggaatttcaagagattgtaaggatatagaaaaagaacttgaaaaagttagagtagcaatagacatgaaagctgaagctataatggatttaagtaattatggcaaaactagagaatttagagaaaaggttgttgaaatgtcacctgcaatgataggttcagtacctatgtatgatgcagtaggatatttggaaaaagaattaaaagatataacagaagaagagtttttaaatgtaataagacaacatgctattgatggagtagactttattactatacatgcaggtcttacaagaagtgtttgccaaaaaataaaaaatcatgagagattgactcatatagtatctcgtggaggttctttattgtttgcatggatggaattaaataataaggaaaatcctatttatactaattttgataaaatattggatatatgtgaagaatatgatgttacattgagtttaggagatgcttgtagaccaggttgtataaaagattctactgatggtgttcaaattcaagaacttgtagtattaggtgaacttactaaaagagcatgggaaagaaatgtacaagtaatgatagaaggtcctggacacatggctattgatgaaatagaagcaaatgtagtattagaaaagagattatgccatggagcacctttttatgttcttggaccattggttacagatatagcaccaggttatgaccatataacaagtgcaataggaggagctttagcatgtgctaaaggagtagattttttatgttatgtaactccagcagaacatttaagattgcctaatttagatgatatgaaagagggtataatagctgcaaagatagctgctcatgcaggagatatagctaaaaatgttaaaggtgctcgtgaatgggataataagatgagtaaagctagagctgatttagactggtgtgagatgtttagacttgcaatagaccctgaaaaagctaagagatacagagatgaatcaactcctactcatgaggatagttgtactatgtgtggaaaaatgtgctcaatgagaacagttaagaaaatattaaacaatgaggaacttaatctaatataatttttggctagtatgactggaataaaaagaagctgaaaagaggaggtgatttagtgaaggttaatgggaaggaaattgaatttgaaaaagatttgactgttatagatttattaaataaatataatttaaaaagtgatagagttgtagttgaagtgaatttagagataattgaagaatctaactacaatacatatgtattaaaagacgaggacattgtagagcttattagctttattggaggtggttaaaataaaaatatttgtaaatgaattattaacagatgttgaggaaaatacaactgcttataaagttagagatagctataacaataaatgtgatgtattggtgttaaatggatatccaattaaaacagatatgcccctttgtgaaaatgataaattaacacttatacaaaaaggagttaagccatcacttgatgaattggaaagcttgttgattgctagacatactccaaatatacataataaattaaaaaaagggaaagttgctatattgggattggggggacttggttccaatatagctatctctttagctagaataggagtgggagaacttttacttatagattatgatgttgtagaaccatctaatttaaatagacaacagtattttatagatgatataggaaaactaaaaactgatgccatgatagaaaatataaaaaaaataaatccatttataaaattaaataaacgagatatttttttaaacaagaacaatatggatactattaaggattcagatttaataattgaggcctttgatgatgcttcatgtaaagcacaggtatgtaattatgtattaataaatttaaaagataaatatttaatagcatcatctggtatggcaggttactatgattcaaatataataactactaagaagataaaagacaggttttatatatgtggggattttgtgaatgaagctaaatttggtgaagggcttatggctccaagggttgccatctgcgcaaatcatatggcaaatttggcaacgcaaatacttatagatatgtaaatattaaaattagatataaaaaagattgaatattaaaaaaatttaacgtggagggaaataatatggataaattggtacttggtggacatgaatttaatagcagattattggttggaacaggtaaatatggttcaaataatatattgcctgaggtaataaaagaaagtggaagtgaaataataacaatggcacttagaagagtggatttagacaataaacaagaaaacatattaacgtatattccaaaagagatgacaatacttccaaatacatcaggagctactaatgcagaagaagctgtaagaatagctagaatatctagaaaaatgggatgtggagattttataaaaatagaagtaatatcagatactagatatttacttcctgataatgaagaaactataaaagctacaaagatacttgctgatgaggggtttatagttcttccatatatgacaccagacctttatgctggaagaagacttatagaagctaatgcagccgcagttatgccacttggagctccaattggttcaaatagaggtcttcaaatgaaagaaatgataagaataatgatagatgagttggatataccaataatagtagatgcaggtattggaaaaccatctcaagctatggaggctatggaaatgggagctgatgcagtacttgtcaacactgctatagcttcagcaggagaccctgtacaaatggctagagcatttaaattagctgtagaaggtggaagagaagcatatattgcaaaaacaggaaatgtgtcagaatttgcaaatgcatcttctcctttaacaggttttttaggcaatttatagaaagtggtgattggtgatgagtttttatgatgtaatagaaaaatatagggattttgattttgatggatatttaaataatgttactgataatgatgttttaagaagtttatcaaaagacaagcttgaagattttgatatattaaatttgctttctaaaactgcagtaaaacatttagaagatatggcacaaaaagcacataaattaagtgttcaatactttggtaaaacagtatgtttatatacaccaatgtatatagcaaattattgtgttaatcaatgtgtttattgtagctataatataaagagtggaataaaaagaaaaaaattaactatggatgaaattagagaagagggagaagcaatttcaaaagaaggtttcaaacatctacttgttttgactggagaaagtagttttcactcaagtgtagaatatataggtgaggctatagaaatattaagagagaaatttccctctataggtatagaagtttatccaatggaagtagaagaatataagtacattgtagataaaggtgttgaaggattaacagtatatcaagaaacttatgacgaggaaatatataagagagtacatataaaaggcccaaaatcaaattatgaatttagactagatgctcctgaaagaggggcaaaagcaggtatgaggactttatcaataggtgcacttttaggtctaaatgattttagaaaagaaactttttttacaatattgcatgggaaatacttaaaaacgaaatatcctcatattgagctttcatattcaacaccaagaatgagaccttttaaagggtgttttgaggaattggtagatataagtgatactgatttagttcaagctatggtatgtatgagattatttgaccctcatgcagctataaatatatccactagagaaaatttagaaatgagaagtcatataatacctttaggagtaactaaattgagcgcaggtgtatctactgatgtaggaggtcattctcaagatgaacatgatactgctcaatttaagataaatgatgaaagtactgttaaagatgtggagaaaatgctaaactcaattggttatcagcatgtgtttaaagattgggaaagattttaaatgtatctgataacaaacagaaaattatgtagtgaggaacgatatttagaagttattaaagagtctatattgagtggtgtagaaaatataataataagagaaaaggatttggaatatcaagagctaagaaaattatatatgaaaataaaaactaaaatcaattgtatagattttcaagagcaaatatcagatgaaagtttgaaaactaatataaatcaaaaagagtgtagaaataaattcaaggttaattttataataaatagtaacattgaattttttgaaaaagtggattgtcaaggtatccatcttccttttaaattattcttgaatttaattgaaaataagtataattttaatgaaaataaaatactaggattatctttacataaagtagaggaagtagattatttagaaaaattaataagaaatcaaaatataaaaatagattacataacattatcacatatatatgaaactaaatgtaaagaaggattaaatccaaaaggaattgagcttttaaaagaagctaaaaagattactgatattaaaataattgcacttgggggaattttaccatctaatgtcaaagaaacattaaaatactgcgatgattttgctataatgtcaactataatgaggtctaaagatattaaaaaaaccatatcaaattataatgaaaagttgaattagtaaatatagtatattgaatttttaacttaaataaaaataaaaaagttatcttttaaattttaaaaggtagcttttttattttatatctttgctaataaaaaattgtaaaaagggaaaactttagtcagagagattaaacaatatcctagaaagatttaaaatttagtaaagtatggaggacattataatgactgacagtaaaaagaaacgatttattataccacacacttttacaataatatttttactaatagtcttgatggcaatattgacttggatagtaccaagtggtgaatttagtagagaagatgtagaaggtagaatggtagttgtaccagggacttatcaaagtgtagaaagtaatcctcaaggatttgcagatgtttttaaagcaccaatagaaggctttatagattcagctgaagttgtaggttttgttttaatagttggaggtgcttttggtattgtaaataggactggagctatagaagcaggaatagcttcggttatctctaagtttaagggaaaagaacttcttataattccaatatcaatgattttatttggacttggaggtacaacatttgggatggcagaagagacattaccattttatatgatatttgttccactcatgacatccttgggatatgattctctaacagcaatagcaattgtatttataggagcagcagcaggagccgccgcttcaacaataaatccattttcagttggtattgcacaggcactagctcaacttgctcctggttcaggagtaacttacagagtagttatttttatagcatatatactaataagtatagcatttgttatgtactatgctaagaaggtaaaggaaaatcctgaaagttcaatagtatatgaaatagataaaaataataaatcaatacttaatcaaacttcaacagaaataaaagaatttacttttaaagaagtatctgttcttgctatatttggaatagggatggcaataatgatttggggtgttttaagtcaaggatggtacattccagaaatatcaatgtgttttgctgcaataggtgtgctttctggattggttggtagattatctcaaattgaaatctcagaaagttttatagatggagcaaaagatttagcatctgcagctcttgctatagctttggctcgtggaatcgtaataattgctcaaaatggatttataatagatactatattaaattccgcagcagcctttctaggtgggcttccaaaggttatatttgtatatttatcatttttcttggaagctgcattggcatttttaattccatcatcttcaggtcttgcttcacttacagtacctgtacttgctcctcttggtgatttggttaatatatcggctcaagtgatagtaaccgcttatcaatttggtgtgggtcttacaaactttataactccaacttcaggagtactgatgggagcacttgcagtagcccatattccattttcaaaatgggtaagatttataatgcctatcttgttgattttgacagctgtatctctagtctttttaacaataggtatttatatagggttttaattaagtgtagttttatttaagatatttagtaatggtataaaatgataatatgttttcaataaattgccactaatttaattagtggtaatttattttttgtatttaaaaataaatgtatttacttgtattttgaattaatatctacttagacattgttttaattgttatattttcatttaattaagcattgatttatcgttttttatatttcatataacaatgcaaaaaataatttttatatagtaaatgacaaaagtttacaataaatgtatattttcttactcattccttaaaattactcatttagtttaataactctcatttcatatgtaaagttggtaaaaaaattaaaattaaaagtaaaaaactaaataaattaatgttaatttgaaatatatatgaaggtttttggagaatacttacttatgataggaaaaaatgttaaaataatagtgtaatcaaatataaaggactgaaataattaacagttattaaatattaggagtgtaaaaatttatgggattaaaagaatttgattttattgaagagtctattgatatgttgaggacaatgtcaccaacattagaaactatatcagatgaaatagaagagtattttgaaaatatcttggatgaaaagaatcaagaatatataaatgtaacctctagaataaaatcagaatcaagtttaagagaaaagataattagaaatagatatttaaaaaaatatggagaagcaagtaatcttattcataatgtttctgacttaataggcctaagaattgagtgtagatttattgaggatgaaaacaaaatatatagacttttgagaagatattttaataaaacagatgacaaaataaactattataataaagagaataagaatattaaattaaaactatctgagaggcaacccaataagcaaaaaaatggatttgaaatatataaaatagatggagtttttgcgtatttagatagagaagtaaaatttgaacttcaaattaaatctcttgtaaatgtgttttggagtgaaatagaacataaaataatttataaaaataatacatatttacttgctgataaatttataaaggatatgatggactctataaagaataatcttactatgatagataatcagcttttaagtatttataaaaactttcattcagggaagtcttttaatatgaaagtaagtaaaaaagaaattgaaaaattatttgcgaaactagtctatgacgctttttctgaaaagatgaataaaagtataggttttgttgtagattttaaaaaaccatgtgaaactatattgaactattcttttaataaacaagatataagtgatgaagttttaggtaattttatgcttgatgagtttgcaagattaaatgaaattgtaaacaaggatatagattttaatgagcaaatagaatttgaaagagaaccaacatttgatgataagttttgtaaagacctaggaaatcattttagaagtagattaaacacagaatttccatggaacctattttttagaatattatttgaaatagagccatataacaataccaaagactttgaaaactttgtagagtttataaaagaaaatgtgctactagaagaaaatagggagcaattattatgccaatttgaagaagatagcaagcttataattgaagatatatatgattgtatatttaatagtataagtgagattgatagtgttgaaattttatataactataatcttgaaaaaataaactttacatcaagtgaaatcataaattgtatatgtagagaatatgagtgttatggtgaatacttagaagaaaaagaaaagcttatgaatacatttaaagaaaagattattcaaatctttgagtaataggtcaatgctgaagtggcgctaatgcgccatttttcaaatatatatgaattaagtaaaattattttggaggaggcgatttgtatagagaaaacaggtgtaattttggcagggggaaaaaattctagaatgggtagagataaagcctttttagagttacatgataagctttttattgaaattgcaatagaagcatttaaaaactttgatgagttgataataatatctaataatgaagaattatattctaaatacgatattaaagtttataatgatatagtaaaagatgttggtccaattggaggaatatatactgctcttgaatatgcaaagtatgatatagttacaattgcatgtgatatgccatatctaaataatcaaatagtcgaaagaatagctaataaaatgaatgataaaagtgtgatttcagtgacaaatggaaagttacaaccattgtgttctggatataaaaagagtataataaataaagtatctttatgtataagggaaaatgatttaaagctcagaagctttatagataaaatagataaaagttatatatactttgatgaagaagatttatttttaaatgtaaacactgttgatgagtatgaaaaattaactaaagtttaattagctatggttgtaaaatagagtaggatttatatggaggagagtttatgaatttacttaaatgcgattcttgggcagtaatattaaataatagcgataaagaaagtaaagcatataaaatattagatgaacttaaaaggaatatgtacaaagttgttgctatagatgaagagaaaaaacctattgaaggaatagatgtgtatgaatgtttaaaagatgttccacacaatattgatgttgtagctattattgataaacaatctaagatggatgtgattttagaagaagtagagcttttggatatacaaaatatgtggtttgaaaaaggaagctttagtgaaatgatgattaaaaagactaaagatttaaaattaaatatagaatataatttaagtttatatgatgagttgactagataaaattatatttcttaataataaaaatataattagttaataaaacatattattttatagtatagattggttaataaaagtacagattggttaatgaaacattaaattacaatatttgttaaaagaattgtgagttacatgatataatgtattaaataggatactaaggagttgatatattatgttaatagtaactacagaaaaagtagaaggtaaaaagatatcaaaggttttaggattagtgagaggaagtacaataagagcaaaacatgttggaaaagatataggagcaagttttaagaatcttgttggaggagaacttactggatataatgaaatgctcactgaagcaagacaaattgccataggtagaatggttgaagatgcagaagctaaaggtgcaaacgcagtaatagcatttagactgtcttcagcttcagttatgcaaggggcagcagaaatgcttgcttatggaacagcagttgttttagaagatgataatagtattcttgaaaaataaaatataaatagttaaaaagaggcatcttttaaaaattttatggatgcctttttttatttgaaaaaactaatttgagaagaaattttaactattatgacaataaaattagggtgatattatataaataagtaaaattatattatataatgtatggtatagactttaaaaattttatttgtagagaaaaatatggacaatgttataataattatagaaattaaaagtacttacattcattatgtatgtgacatgtataattagttttatatttaatacagttttgaagtaatatcttcattttgagaacgttggaataataaaaaatgtatgtattataggtgatataaataaaaaataaatataatatgttatattgctgatagaaaagagaataaaagaaaataggttttattaaaagagatttttatttataggacttaatcaatgtatagaggggtgagaacatatgtttaatgttgcaattataacacttagtgataaaggatatgaaggaaaaagagaagatataacaggaaaaaagttaactgaatttgttgaaaatacaggagcttataaagttactgagtatgtacttataaaagatgataaggaaatgctaaaggaaaatattataagactttgtaatagtaataaaatagatttaattcttacaaatggaggtactggtttttcaaaaagagatataaccccagaagcaactaaggaagtgttggaaaaagaaataccaggtctgagcgaatatatgagaatgaaatccacagaaattactaaaaaggccatactaagtaggggtgtgagtggaataagaaataattctataataataaatttacctggaagtcctaaaggtgcagttgaaaatctaagttttataattgatgttttagaccatggcatagaagttttaagaggagaagctacagaatgtgccactaaaaaaagtgaatagtatataatctagatagataaaaaatagacaaagaggtagataaagtatgattgataagtatggaagaaaaatagactaccttcgtatttcacttacagataagtgtaatttaaggtgtgtctattgtatgccaccagatgtaaaatttgataaaaattatataaatgaaaatctaagctttgaagactacaagtttattataaaggctatggctgaacaaggtataacaaaaattagatttactggaggagaacctcttttatatcctaaattaaatgagcttataaaatttacaaaagaagaatgtggaataaataacataggaatgactactaatgctattgggctttctgatagaatttttgagcttgaaaaatgtggcttaaataaagttaatataagtttagattctttgaaggaatataagtataaatccgtaacaagaggaggaaacttaaaagatgtcttaaaatcgattgaatcttgtttaaacttaggtataaaagtaaagttaaattgcgttgctataagtgggtttaatgatgatgagcttaaagattttatgtttttaacagttaaatcaccaattgatgtaagatttatagagcttatgccattaggtgaggctaatagagtttataagaagggttattttaatgtaaaagaaatgattgaaaaaatatatggtttatataaagtcaaaaatgatgaaaaaagtacagcagaatattatatgtttaaaggagctaaaggaagaataggaattataactccattaagctgttcattttgtaacacttgtaatcgtattagacttacttctagtggtgcaataaaattatgtctacattcaaaagaagaaatagatataaaaccatttttacataaaccattgttatttagagaatctatgaaagatataataaaacaaaaaccagaaaaacatcatttaatagaaaataaatgtagtgatacaaataggcgtatgtatgaaattggaggataagtaatgttaacacatataaatgaaaaagggtatgccaagatggtggacataagtgaaaaagatgatactaaaagaacggccgtagctacagctacaattactcttagtaaggaagcattagaaaaagtaaaaaatggtcagataaaaaaaggagacgtattgtctgtagctcaagttgcaggtataatgggagctaaaaatacatcttcaaacataccaatgtgccatcagattaaattagttggatgtgatttagaatttgatgtagatgattatatgtctgctattaagatatacgcaacctgtaaatctcttgggaaaactggagtagaaatggaagctttaaatgcatgttctttagcagcacttacaatttatgatatgtgtaaagcagttgataaaaaaatggttataagtaatatccatcttgtggagaagactggtggaaaatcaggagattttaagttcgagtaaattaataatatattgggttaaaatttggaggaaatatggcgaaggtagtgtcaataaatataagtgagaaaaagggtgtaattaaagttcctgtaccatgtgcagagctaaaaataaatcatgggatagttggagatgcacatgcaggaaactggcatcgtcagataagcttacttggaaaagaaagcatagataaaatgaaaatgaaaggctttgaccaattaaaatatggagattttgctgaaaatgtaactacagaagggatagaagttttttccctgcctgttggtacaaagttaagaatagggcaatgtgaagttgaagtaactcaaatagggaaaaaatgtcacaatggatgtgaaattaagaaattgacaggtgactgtgtgatgccacgagaaggaatttttgtaaaggttctaaaagaaggaattataaatgtgaatgattcaatagatgtaatctaatgaagtcactattaaaatataattataagtaaatactattaagatttaaatatatattttaagagagaattaatttaaataaaatattttagttataaattggaatattggttatataaagctatgaatgtaaaatcatagctttttgtttttgaattttaaaatataatattttatttatatatattaaattatattttatataaaatcaattgtttaaatatatattatttatactgtaaatttatagataataaagtataaaaaaaatatattttgatgaaatttaaaaaaatacattatataaatatagtaatagtatgaaaatttacatataaaactaaaaaatgtaagtaattgactttttaagttgacaaaatattgcatatatattatgatataaatcataaattaactacaaatcaatattatatattcgtagaagaagaaagtagcataaaggaattttacagagagttagatttggctgagaactaatattggaatttatgtgaaaaggactttggagaatactattgtaattatgttagaatagtggtttaattcgccttaagaaaatgagtgagtaaaattaatttttactaataagagtggtaacacggatttatattcgtctcttggatttttccaagaggcgttttttattataaacttatttcagaaaatttaaaactatatattaaatgaaaattataaaaatatgatagttaataaatttataaattagaaaattgtaaaatatgctaaggtcagtagttttacgatttaaatggagggatgaaaatggaagaagaaaaaattaactatgctctggaacagattccagagaatcaaaaacgtggttgggtagctatgttttcagttttagtagcaataggtgtggatttatcatctgttattttaggcgctgagttggcacagagtatgccaatgaaacaagcaatattgtcagtaattgttggttcatttttttctgcaattttgtatactacatgctctttggttggttcatctacaagtttatctacatctatgataacaaagtatgtatttggagaagctggagcaaaaatattttctctagttataggggtttctctattaggttggtttggagttcaagtaggtttctttgcacaaaatgcacagataataataaaagatatatttaatttagatgtcagtatgcagattttaagcctaataggtggtctcttgatgatgagtactgcaatttatggatataaggccatggagaagttgagtgtgtattcagtaccatttttattagttcttatgatgctaactatattcttagcttttagagcaaatggaatttcagttgatgataatatgaaatctactatgacatttgcaggtggagtttctctgtcaatgagtataataatagttggtgcaattgtatctcctgatataagtcgttgggctaaaagtagaagagactgtgctctttcaagctttttgggaatacaatttggaaatgcttttatgataatagtttcgatagtattagtaaaatgtatgggaacttcagatattatgagaatttttattacattaggaattgctataccaggtataatagtacttacattagcacaatggactacaaatacaagtaatgtatattcagcatcattaagtatagctcttgtacttaagaaggctcctgagaaagtattaactatagtccttggtattatagcaacattattggctgtatttggaatatatgaaggttttataggatttttaaatttacttggaattgtaattgcacctgttggtggtgtatatacagcagaatattacatagtaaagcaagaacttaaaggctttgataaaggagtattatataaaccaatagttaaacgttcaatagtgtcttggataattggtatattaataacttacctttcaacatatggatttataactcttactactatagcacctttagatggttttatagcagggtttgtagtacaatctattattggaaaagtgctttgttcaacaaaaaataagcaagaaatagacaaagcagtataaagaaatttgtttataaagtataaaataaattagaaatatgaggagaaagtaacatgagatttttaacagaagaaagtgtagataaaatagcagttggtgcagcagtgcttggaactggaggtggaggtgacccatatgtaggtaaattggttgcaaaacaagccattaaaaagtatggtcctgtaaaagtaataagtttagatgaacttgatgatgatgctttggtagttccagtatctggtatgggttctcctgtaattacaatagaaaaattactttcagaagtagagttaactacccctttagaaataatggagaaattattaaatagaaaagtggatgttataattcctatagaaataggagggataaactcacttatgcctatagcagttgctgctaaaaaaggacttcctatcttagatgcagattctatgggtagagctttccctgaagctcaaatggtaactttttatcttgaaggatatgaggcatctcctgccgtaatgtctgatgaaaaaggtaattctgccatcctttatcctgtggatggaatttggtcagaaagattagctagaactttaactgtagaaatgggaggaagttcttctattagtgactataatttaagtggagctcaagttaaaaaagctgctataggtaatactcttacaatagctgaaactataggagggtttttacttgaaaataaatctgattcaaaaggtgctgttgagaatatactaaaagaattgtgtggatacaagttatttgaaggaaaagtaattgatattaagagagagttgaaaggtggatttactagaggacatgccttttttgctgggattaatgagtatgatggagagtattctatattattccaaaatgagaatttaattgccaaaaaaggtgatacaccactttgtattacaccagatttaatagcagtattagatttagaaactggatttccaataactacagagagaataaaatatggctctcgtgttatggtagtagcttttccttgtaatgaaaagtggagaacagaaaaaggaattgagacagttggacctggatactttggatatgatgtggaatataaaacagtagaagaattacaaggaaaataaaagtttaggaggaaattttgatgtatcgtgtaggaattgacgttggaggaacaaatacagatgcttgtatactggatggggaattaaaagtaattcattcagttaaggtggcaactacaaaagatgttgaaactggtgtttacaatgccttaaaaaaagttatagatgaaagtaagattgaccattcattaataaaatatgctatgcttggtacaactcattgtacaaatgctattgtagaaagaaaaagacttaataatgtagctatgataagaataggaaagccggccactactgccattcttccatttatagattggccagaagacttaagagaaaaaatagaattagattcaatattggtatctggtggatatgagtttgatggtagaaagataaatgaactttgtaaagatgaagttgtagagttttgcaatagaataaaaggcaaagtggaaagtgttgcaataagtggagtatttgctccagtaaataaacaacaagaagaagaagttgcaaaatgggttagagaaattttaggggatattcctatatctttatcaaatgaaataggtaatataggtatattagaaagagaaaatggagctattttaaattctgcattgtctcaagtaggtaaagctgtatctttaggatttgaaaaagcacttaaagacttaggtatagatgctcaaatatatttcagtcaaaatgatggaacattaatgaatttagagtatacaatgaaatacccaatttttacaattggatgtggaataacaaattctataagaggagcttccttcttatcaaaagtaaaaaatgcaatagtattagatgttggtggaactacaagcgacttgggtgtactatataatggattccctagagaatcatctattccagttacaattggaggagtacatacaaactttagaatgccagatgttttaactattggtcttgctggtggtacatgtgtaaaaggcgaaaaagataatataaagataggtcctgaaagtgtgggatatagaataactgaagatgcaataatatttggtggagacactctaactttatcagatgttgttacaaaattagatatggcgtttgaagatagaaaaagcaatgttgaaaacttagataaagagtattgtaatgaggtatataagaaggttattttaaaattagaagatgctgtagaccaaatgaagactagtcaagatgatgttgaattggttttaactggtggaggaagtataattgttcctgaaaaactaaaaggcataagcaatgttataagacctcctcattatactgctgcaaatgctattggtgcagctttaggacaaataagtggagatgtagaaaaagtatacagtttagataaaatgtcgagagaagatgccatagaagatgcaaaaaaagaggctgtaaataaagctctaaaagctggtgctaaagaagatactatagaagtattaaatatagaagatgttccacttgcataccttcctggtaatgcacttcttataaaagtaaaagttgttggtgatttaatttaaagaataaatataagtatttccagaattatataaatatttctggactcatttttaaacttattttatcaataaaaacagcataacttttgactatattcttataagtttccgaacagccgatatatacctattttttgaggtttatcggctgtttgttatcttttatcgcattccaactatttttcttaccgtatttgctgtacgaattgtaatcttatcacttacatttgaactggcagtctttgaccaccaatttgtctttttataatctttacgactaaaagaccaaaagatagcatttttataatgatatactttttcatactcttctttaggatttccaacctcatcataaaactcgtcataagataagtcaggaaacataaaaataagattatcatatatttctttgttgttatctccccaccaattaggagcattatttagtatatcttttaactcctcttgtgaaataataaaaactggtatttccaattcaaactgtttttttatcattaatcttattgtatttgagataaccttgttgtcatctacatcacttaaaaagacaacattaccactattaaggtatgtagaaacttctgaataaccaagttctacaaagcttgcttttaattcagacataattatcttgttcttaccacttatattgatacctcttaataatgcgatataacttttcatataataagttcacctctaaacattcacatttttctatgtagtacaaactggaatttgcatcttttataattctttcaaaacttcttcatatgtaatttttttaatataaaaaaatcggtgcttaatttgtaccgatttttatttttcttagtaaagaactcgtttttttgcttctgctatagctctagcagcactttttgcttgcattcttttttcttcttcttttttaaattcatttattgtttcatttagattcttatcatgttcatttttttctttatcttcgttttctctgtatactaatatataatctattattgattcgtttattatctgagatatacttttattttcattaattcctattctcttaacttccttaagtagagtctcatcaatatgaaccgttgtttgctttgtattttttgccaccttaatcacctcttaaaaaaaattctaacattaaaattttttttagtcaataaattttaatattaaaattctttaaatgttttatttgattttctaaaattttctattgtatttatcatcttattttttatattttcacctagtacagaagactttagtctaggattttctatatggtcataaattggttctaaaaattcgacttcgacaggaacagagttaattttaccaataggttggtatccttcataagtatcttttgaattttttattacgagtggaacaatagggcattttgctttatatgctatctttaaagctccacttctaaactccgaaaccaatgaatttggttctttaatccatgttaaatctccttctggaaacactgccatactttgacctgtaagtatattttgagaggcttgggctatactctttataccctcacgattgttttttctgtttacatatacacatcttagtaattttgcccattctttaaatataggtatatttctccaaactggttcatctgcaattacacatccaattggtctttctacacttgctgttagtatgaagctgtcaagcatactagaatgatttacaacaaatagaagtggttcttttggcagtgtttccttaccaattatattaagctctatgttcactatatctaaagattttttagcttgtttttgcataaattcaaatttttcctttaagctaaatttatcaggattctttttaattttaataaggctaggtatagaagatgtaaaacctataagttgatatgtagcaaattttaagtaattattcataaaattatctccttaaaataaaattatttattactgtaaagattttaacataaaataaaatttaagtctattttaattcaattttgtaacatatattttaaatagacagagattgagattttatatttctaattttagtaatcagattttatcaataaattactattctattaatttaattaaataacctttaaatttaattataaaaactgttgcagaaatttctacaacagtttaaaaaatttaccttacaaaaacttattttataacaagagagtatattataaggctagtacagcccattttttgcactgagaaattcttttgccatcatcaccttgttctttgtcatatgcaaattgattaagcatttcacatggaaatgtatcacatagaccacaatgtataaggtttttatcttcacaacaagattttacaggacattgttcaccccaaaatggtttctcaatatctgtacaacctttacaattgactttttccttgtatccacattcataacataaaattccacatcttgattctatcattttaagtcactccttaaatataaattttattatgattgtatatcaaaatttatacttttcattgtaaaaatcggacaaattttttatataggttgttggattaacaccacaaatagatttaaaatcatttataaaatgagattggtcgtaataaccaatatcttgtgctaaagttgcaaatggtcttttattgttttgtacttcttgtaatacaaggtttatacgaagtaatctaaggtatgatttaacactcatcccaagagaattattaaaaattctatttaaatgtcgttcactataacaactaatttgtgaaatgtttttaacagacataatagagttctgttttctagcattttcaagaattggtatagtcatatctactatatttgatttcaataagtatgataagaataacatatctaattgttctactaattcctttatagtacttgttctttcaaaaatggaattaacctctaagctaaataatgtgttaaaatcttcaagtgaaatttttaaatctgtagattctctttgagaaagacctgtcaaataatatactccacctgggcgaaactcaacgaatactctaaaaagtacattttctatatcattttttacaatagtagtttttgttgtggctccccagaatgcgctttctataccttttttgtcaaatttaaatatcatacatccactagcatcaggtattaatgtaagcttttctttaatacttgtatctggaatagatattgtatagtgtgctatatactgtcttaacaatttatgtggcaaaatatatgtatactgtttgcaggtatttaaaatgttattgattattttattcataagtatatcctcctgatatataaaaaataagtatactaatttattttttatataataaaccagttttgttttaattgaaatattctaataagatattttgttaaatttagatacaataattgtaaagtaaaatctcaaaatatacaattattataaatcatagatatttattaaataaatatattaaagaagaaggaatataaaacaagattagaaaataatagtgttactttcataataaatacatataaagatatttttaagaataaaatttattattaaataaaaaataaaggagagtgatttaatcgtatggcatcaaaacaaacaccaagaaacaatttagaaaagtttttaagaataagagtcttatcacatacaggcgataaaatacatataaagttacctgtaaattttgcaaaaagaatgattgagaataatgctttggatttatttaatggaaaagatgatgtagtagatggtaaaaaggttactgaaatattagtcaaagcatttgactatgatttaactggagaagtagttcacttggagagaaaaaatggagatattattaaagtttcaattgtacaatagaattattttatatgaattttatttttgaatagttataaataattagaaatttgtaaaaaagtataatatattattagtaatggtgcagaatacacatttataatttatagatgtgtattttttgtttaaaaaatttaaatatataaaactataaaggttacaattttggaaatagatgtaaatatatgttctattgtataataagagtaatataaaatctagtaaaaataatcaaataaatttaacttatgagagggataactatggaaaataaggattttaaattaacaatatgtatatttgcttttgtaattggagtagtagtattattctgctgtataggtttgggtgaatttagtgcagagcatattattcaacaaaatggtggaatcatggatactgaccaatataatatttatctagaccaatctatttctcaatatagaaattttggttctatattagctctgttaggaggaatagggatattgtttgataaatatatcagaaaatactagagattatgttttgtctaaaataaattcttatgaggagataaaaaatggcaacagaaatatttactgtaaaaattacacccttagaagcacaaaaaatgataaaagaaaatattgatgcagatttagtttttagtgattcttataatttaggagatgataaatttatactaattacaacttttgagaagtattacgcaagaaataatagtgatgcaggattaatcgtagtttatgaaaataccacagaaaaaacagttattaaagctacttcaacaggcagtgcaattggagttttaaaaattgattggggtgcaggtggaaatttacttaaaagagtaaaaaacatacttgctgaatatattatttaattattttatctaactgataatatgtcaagaaaatctcgtaaaagaggttaagaatatttttataatatatagataaataaggatttgaaggtaaagtttttaatgtataaagaaaaataatataataaaacgaattggctttataattctttataaggcaaagagtacatttctttatataattgttggatattaaataatatgtaaatacaccatttacatataaaagtttaattaatatgttaaaagaaaatgaaatggaaattactaaaaaatacttttaaattggataatgattgatattacgtttatacaaaaatcaagtagaattttatatattttaaatatgatagtttaaaattatgaaagaatgataaattccagtttgtagggtagttttgataaataatattaataaatatgagtaaaaagtaggagcatattaatataatattcctacttttttattattaaaattgtttatgatatcaacactacattaaaacacaacctaaatttgaaaaacaaatagtttagaaatatgtactttttttatttattatattcttttaaatcgaattttttcatctgaacataaagtctcaaatctatatgcatctgtcatctcataaaaaccaaaaaatataaagccatcacgagaagtaaattcatattgtatattttcaattttcaacatgttttctacttcgcttattttttcgctatatataatttctaccatataatttatcattgtagaatccctcctattaatatgaaaatatccaaatatataataacatatttagatgatataatagtatccaaataaaaaataatcttattacattattgaatgaagaattaaaatgaagataaataaaataaatattggttataattgattaaaaaatagttatgtatacttgtgactttagttatgggcagttcaagttttatgaaagaagtcatatatatatggaatattctaggcagaagctgtttaataataagagaatactataaaaatttgagtattacataaaaaataagaagccataaatgatataagcattatctatagcttcttacttctcattgattaagattatatataaaaataatcactatattttttgtttaagttttaatacttgttttactatatttgttgagtggtcagaaattctttctagattagtaagtaagtcaagataaagtacaccagcatcaattgtacaatttccattatttagtctaatcatatgtgaatttctaaaagttttttctaaataatttacttcattttcaacttctaaaactttatttgctaactcaaaatctttaacatctaaaactattaaggcatccttaaaattagtaattgtcttattgtatatttcgtatatttctcttatcgcactatcagaaaaactaatgttcatttccttaacactcatggccaattcagctatattttctgcatggtcagagactctttcaatgtcatttacagtattaaaaagcaaatctgttctaaagcgttcatcgtctctaagaggttctttagaaagttttaacaaatagttcaatatatctttctgtaacttattgacaactttttctgactcaaaagctttattaatatcttcattgctcttatttaaaaatcctgcaattgaatgttccaaagagtttgtagctttatgacccattcttacaacttcttgtacagtattaccaagtgctatagatggagtgctaaacatcctttcatctaagtacttagtattatttactatttctgattcagtttctttaataggtataagtctatttgctaatttaactatgtatttagaaaatggtaataatattataacatttgtaagattaaataaagtatgtgcatttgctatttgtctagctgtatcagttgggtcaaaatgagtaactatggctgatataggtttatttaaaacaagcataaatattattgtaccaatgacattaaaacttaaatgcattacagctgcacgtcgagcatttctacttgcaccaacacttgataaaagtgaagtaacacaagtacctatattatctccataaagaataggtaaagcagatgatagaggaagtattccttgagaagctagtgctattaacatacccatagatgcacttgaactttgaacaataccagttatggcaaatcctgccaatatacctaatacaggatttttactaaaatataaaagtgcatcagtgaatgctttatattcagcaagtggagctactgcatctttcataaactccattcctgtaaataatataccaaaacctataagtatctcagataaatgctttgttttttgatttgatgtaaataaatagaataaaatacctatacctaaagcaattggtgcaattccttcaagattaaatgaaactaattgagcagtaactgtagtacctatatttgcccccattattacaccaatagcttgacttagattcattatacctgcatttacaaatcctacaaccataacagtagtagcacttgaactttgtataatacctgtaacgactgtacctaccagtacacccataacaacattacttgttaagagttcaataattttttttaatttgtctcctgctgatttttgtaaaccttctcccattaaactcattccgtaaagaaaaagtccaagtccaccgataaggctaattactatattcacgatatttcctcccttaagaaattaatagtttttttatctgaattataaactttattaactaaaatttattgtttccataatatagaataacaaattttgtcaatagaaatattaatgttttgttaagtatacgttaagagaatgttaaatttttaagttgttgttaattttagaaaatttatgatatatagcaatttaaatacttgaacttagatttttagtattttatgtacaatcaatttaacaaagaattaactataattgtaaaaaatatgtaaaaaaatagcatccttttagaatgatattttttagttataaatatttttatattcaattggtgtaaggttattaaactttttaaaaattatactatagtaattttgactattgaatccaattagtacagtaacgtctaaaatagacaagtctttttttaatagatactttttgtttttttcaactctaactttatttaaaaaattagtaaaagtatatccactttttttcttaaacaaagaaaaaaataacttttattaagttgtaattcattacatatattacttactgttatatcttctgagtagtttttgtgaatataatctatagttttctttaagttttctttacataaaactaagagttggtctatgtttcattttatcaaggcatatttattaaaaaatcaatctctatttgttaaaataatttatgaatgatgttagaaactgtaatatattggatataatataataaacagataaactctgtattaagaggatatatagtttatcttaattataggggaagtgaggatatattatggaaagattaatggaactcatagaaagaaaatttttaaaggatgtagaacttttagaattagaagacatagaaaatgtaatagaatgcaaaatgacacagccatataatgctcattataatgaatacttagtaaaagtaaaaaatggagatgaagtagaagaatattttgtgtatttaaaacatagataaacataaaagaggtttatatttatttgtatgattataaaataaatacaagcctctttttttgataaatataaaattataaaatttttatttatttaattttttcaacaacattagtcaatattgaatctaaatcatcactaatttctgtaactccattatgagtaatatctataatttctttagtcataggaagttctcctaaaagctctaagtctaaatcatctaaaaacttttcagtagattctccttcaaataacttgatttttttagaacaatcaggacattggatataactcatattttcaataactccaaggacatttatgttcatttttttagccatattaacagcttttgatacaatcatagataccaaatcttgaggtactgaaaccataactattccacttataggaatagattgcataaccgttaaggcaacatctccagtaccaggaggcatatctattaataaatagtctaattcttcccaaagtacatcagtataaaattgctttacaactcctccaagtaaaggtcctctccaaacaacaggttcattctcatcatctatcataaggtttatagacattacttttatgttatttgagttttctacagggtaaatataagagccatcagaataagcttttacattttttacacccataagtctaggaatacttggtccagttatatctgaatctaatataccaaccttatatcccattttgtttagcttattagcaagtaaagcagttacagttgattttccaactccacccttcccactcataacaccaattatttttccaaatttattgttagggttattttcaatagaacaatttgattgactattacaatttccctttgatggacatgaattacaatctgccatatctattacctccaaactttaatatttattagattatttgtaacctacatatactattttagtacaattgaaccataaagtcattatttaaaagcaacttagaagattttctattgatttattcatagactatagcaaaaagaatacaataaaaaaattataacattcttgaaaaagtgattatttcaatttagttatagaacttagtcatataaatatatagaaaatattttaatatattatacataacgggttattttataagtttaactataaattaggtttatattttataaaaatttgttaaaaaaaacaattaaaaattgtaaagaaaaaagatataattagaactgtagtaataaatgttttattatagataatagagttttaagtatcttaaataatatttggaggaatatgaatggaattaagaccaagaagtgcaaaattagaagaatttgataaagtaatagaattaataaactatgtatttagaatatcaagaaatcataagccaactatgatggaagaatttcctcttttactaagtaaaaataatatagaaaatatgattataatatcagaagatgataaagtggtttctgatgtaaactatctaattcaagatgtatctattcaaggaaatagattgaaggttgcagctataggtggagtatgtactcatccagattatgaaaagagaggctattcatctaagatattggataaagtagaagaaaaaatgttttatgatggtgtagatattgtaattatatcaggaacaagaagtctatacagtagaagaaattgtagtttggtaaagagtttttataaatatacaataaaacctgaagatgtaaaaatagcatatgaaatagttgaatttgatgaaactaattttgaaaaagatgatgatttagataaaatgcttgaactatataatcaaaatagtactagatttataagaacgagagatgagtttcaaaaactattgcatgcagcaactattgcctggggaccaattggttacaagaaggtatttataaaggaaaataataatataataggatatttgataataagaacaataaaaaaagaagattctactgtaggagaagttgctgaaatagggttaaactctgtaaatgttgaaaatatattgaaatatgttgcaaataaatttggattagaatatttaaattataaagtacatgtgaaaaatcttaaagaccagttgaaatgtaatgggacagaatctttggactatcaacaaggaactatgaaaataataaattttactaagttgtgtgatagtttaagaagttattttagtcaatatgtagattttgaattactaaaatacatggaatttaaacaagttgaaaataaatatattattaaatacaaagaagaagaacttgtaatagaaaatttggataagcttaataaactgttttttgaaaaaaatgaggaacagtataatgaatttaaacatctaaaaaatatatatgaatttgctacaaaggcatttcctgtagattttccatggactgcaaatttaaattatcaatagttttagatgatattaaataaaattgattgatacctagagttagtccttgttaaataagagaaattattggatattgaaaaagcaattttgtaagtaattagaaaggatgagtattatatggacatacttgatgatatagcagaatgtatattaaatatgggtgtagataatatagagaatttagtaaaaattgctatagataaaaatattgatgtggaagatatttatgaatatggtttaaacaaaggtatgataggagctttagataagtttgagaataaggaatactatctttcagaagttatagtatgcacagatgcattaaataaaggtattaatcttttgaagggaactggaaaagtaaagaaaaaatcaaagggagtaattctgatgtctgtagtagaaggagatactcatgagataggaaaaaatattgtaaaagtaatggtagaagccactggatataaggttattgacttaggtgtaaatagaaaaagtgaagatataatagaagaagctataaaaaacaatgtagatataataggcttatcttcaatgatgacaactacaatggaaaatatgaaatcggttatagacgagcttaatatgattgagatagataaaagaccaaaagtaataattggtggaggacctgtaagtatggagtttgcagaagaaataggagcagatggatacagttcaaatgctccaaaagcagttaaattaataaacaaacttataggaggtgaagtttaaatgttttcagatatgactttacttcagtatataaatagtgaagatagaggtttttttctgcctgatatgggtacaaatggattgttcttaataaataaaaaggcatatgaagtatatgatagtgtagatttgcaattagaattagcaaagactatggacaagtattttgaatcagattttatatactcattctgtgatgggattacattttgtgaaactctgggtttagagacattaagaccagattatgattttccaagtgtattgacacatactataactgacagagataaattaagaaaattagatgttccagacccttatacgagtggacgtatgccactcaatatagagagcttatcagttatatcaaaaagtattaaaaaaccactatatgaatcgatacaaggtccatttacacttgcaggtcaattagctggagctactcaacttttaagatgtataataactgataaaaaatttgtagaagaattgttggaatttacaactgaattggtaagaagatatgctgtagctgcaaataaagcaggagcaaaatatatttcaatagcagagccaacgtcagtaaccctaagtaaagatagatttgatgaatatatagtaaaaaatttaaataaaatctacaatgaacttgattgttggaaaggtatgcatatatgtggagacaccagagaattattagataatatgctaagttgtaatatagatgcagtaagtttagaccaaattttagactatgaagaaattgctccaatgattcctagagatatagtgttgattggtaatttagacccaataaaacttcttggacgttctaagccagataagattagaagagagacactaaaattgttaaagaagatgagaggatatgataactttttatgtgattttggctgtaactgcttaaataccactccagtagaaaatttacaagcagctataaaagcaggaagaattaattataaagaattagataggattgatattgatgaattataatagtaataaaaataaatatcttttaaaggatataaatttagaggatatttttatagataagaatattgtgctaaagtttttggggtatggaaatagaaaagctccagatacaattagtgaaatcgttgaaagagaaataagaaatataaatgatattttagatatcaagatatatataagtgaagttgatattaataaaacacctaaagaatgtaaaaaagcatttgctgtactatatacaataggggataaaattgatattaagatgaatgactatatggaaaattgcaatatgatggcagggatagcattggataaaataggtatagtatgtttagattatattaatgagaaaataaaaatgtatttaaaaggaaagtatgatagtcttaaaatatcgcatgaaatatatccaggagataaagattttgaagtagagagacaaaaggatatttataactatgtaaaaaataaatataatagtatagaaatagaaatcaatgattatcatcaactatcccccataaaaagtgttgcaatgcttattttaatgggagatgaagaaaatttagaatcaagatgtagcaaatgtcctagaaaatgcttttaactagttttcaagactaagatttgttttgtgtatgaattgcaataatttttttggtcattttatgtataaactaaaaaaattattgcaaagtaatattctatttaatttgaacagacttacaaactatagtagtttctttaattcaataagtgtatttatttcataagttggtatatgattagtataatttatactgttattggaatttaaccaacaagtatctattcctgaatttattccacctaagacatcagaggttaagctattcccaatcattaaggcagaagatttatcatgacaattaaactttttgagagcgtatttaaatatttcaggatttggttttgatattttcaactcttcagatacaaccattccatcaatatatccttttatttttgaattttcaagtcttttcttttgaactgcagaaattccatttgttattataacaatagtatacttttttttaagatattgtaatatatcgattgcacctggaattaaaaatgtacattcacctaaaaaatttaagtacattttgctaagagtttcagaatcaacatccaaagatattttatttgcaaaaagttcaaatctaagtaatttaagttcattcaaagttataatatttttttcaaggtcgagccaaagcttatcacttatatttctatatgactctatataattctcaaaattaaattctaaatcaaactcagatagaagttttttaaaagcatgtgattcacttttcttaaaatcaaataaagtatcatctgcatcaaaaaatataaatttatatgtcttcatggtttttactcctttacaagatgactgcaaaaattactttactttcactatttgagtcattttgccatttatgctttgttcctaaaggaacttttacactatctcctttggacaaagtaaattcatcatcatccataaaaagtttaacttctccctccaaaacatatgcaatttcatctccattatgagtaatcctatcaatacaagaagaagtatttggagctaaatccataattgcaaattctaaattaccactagagtctggaattaaaatctcatatataacttctttgcttccaggtaaaataactttttttctattatcatgtcttactatcaagttttttttatctacttcagatacaaaaaatgtaaataaaggaacgtttagagaagaggctatagattttaatgaatttacagatggattagcaagacctcgttctatttggctcaataatgatggtgtaacatcagctagttttgctaaatctcgaatacttaagttttgtttttttcgaacttcagctattttttcccctaaatttaaatcattcatataaatatcctctctttttaatttaaaaaatattaacttaaaataatcaagtaaaatgattatgtagtatgaaattattataacatatagaattaggttttgaaaaaactatgttcaatataattaaataaattaaaatataattgacaaagtggatacagaatacttaaaatatatttaaataaaattaagcaaaagatagttaatttatgataggaggggacattatgcaaataacgacttttggagctatatttggtttattaatagcaattattttaattataaaaaaatttcaagctgtatatagtttaatgttaggagcatttattggaggattagttggaggagcaaatataacacaaactgtagattttatggcaaatggagctatgaatatatcaccatcaattcttagagctttggcatcaggtgtattagctggaagtttaataaaaacaggagcagtagataaaatatcagaacagattgtaaaaatatttggtgaaaagagggctttattttcgattgccatttcaactatggtacttgctggagtaggcgtaaatttggatgtatctataataactgtagcacctataggattatatataggtagaaaattaaattattctaaattgtcaatactattagctatgttgggagggggtaaagcaggtaatataatatcaccaaatccaaatactatagcagtagcagataatttttctgtcaatctctctagtgttatgatggcaaatataattccagcaattattggagttgttattacagttattttagcaagtatattaataaataaaggaaataaagtacaatcatatgaaattttagagcaaagagaagatttaccaagtttatttaaatcattatgtggtccaattatagctatatttctattgtttttaggaaatgtatctcctatagttatagacccaatgatagcccttccaataggaggaatcgtaactctaattgtcacaggaaacttgaacaattcaagagaatatttagcttttggattatctaagatgcaaggggtatgcatattattacttggaacagggactatcgcaggaattatacagatgtctgaattacaacagagtacaataggtgctttacaatttttaaatatgccacaatttttattggcaccagtttcgggtatacttatgtcattagcaacagcatcatcaacagctggtgctactatagcatcatctacttttcatgatgctataataaatggtgggctatcaccgatttcaggtgcatcaatagtaaatgctgggtctagtgtattcgagcaattaccacatggctcactatttcatactagttcaggtagtataaacatggatataggtgaaagatttaagttaattccatatgaagcattgataggaatagtaatgactataatttcaacatctattcaattagttttataataaatataaatatttaatgaaaaaagtaggattttgttattaaatattgaatttattatagtaaaaaagaagattggagttttaaagtgaataaaaaaaagattgttattatagggattatttattcatttttagtagtattttcacttacaaatatgtatgtaaatatggagtataatttaaatgtatttgaatatattaagaagtcacttccatttacagaagaagaaaaaaagtggttagaaaaacacaagaatttgatttacagctctgaccaaagttcacctcctttgagatataagggtaaggaagatggacagtataagggaattattgttgatttaataaattctctgtcaattcaaattggtagagatttttattttaaaccaaataattggtggaaagaatctttcgtaaattcaatagatgatagtataaagttttttgacttgattccatcaaaagaaagggcaaataaatttatatttactgacccaatatacactttgagtgcaaatatattgaaagataaaaagtcccaagatataaatagttacatggatttaaaggggaaaacagtagcaattccagaaggtgattattctataaattttttaaagcaaaaaattcaagatataaacattttattgactccagatataaagactggagtcaaccatttaatgtctggaaaagtagacgcagttgttggtgatgaaccagtattgcgatactatataaataattatggactttcaaataaatacagtgttttaagtaatcctatatatactaaaaaagcagttcttgctgtacctaaacaatatgaagagctggttagtattttaaataaaggcatttttaaacttcagaaaaatggagtgtataaagatttaaagaaaaaatggtattctacgtataatgaagttgatgatatattgtatgagcgaggaattgtgcctagtatttatctttttataggtataattttaatatcaatttatgttttttatagctatacatatttgttaaagatagaaatcaaaaggaaaacagaacaggtaatagaaaataaaaaaactttagaggcaacttttaatagtattacagatataataatgcttgtagatgaaaataacaatatagtagaatcgaacaaagtactatatgactttatgggtgaaatgagttataagatagcagatttgattagcatgataaaaggtgttattaaaaataccttctctgaaaatactaataaaactagtgaaatagaaatatacaataaaattttaaagataaacacttttcctgtagagtataaaaaaaataatactgagtatatagtagttcttattaaagatataactaatgaaaaaatagtagaggcgaaattacttagagaaaacaaaatgatatctataggacaattagcttctggggtagcacatgagataagaaatcctttgggtataataagaaataattgctatctattaaaagataacgttacaatggaagaagtgaatgattgtgttaaatcaatagaaagtaatgtagatagggcaagtaatataataaccaacttgttaaatttcgcaagaatatcagatgataatttagaacatataaatataagaaattttattgaaaatatagtgaaacttcaatataaaatgttacagttaaagaatgttgaaataaaaattgactgtgaacataatttagtatgctatataaatggagaatcgttaaaacatgtatttataaatttaatttctaattcaatagatgcaatacatcaagatggaaaaattattatatactgttatgaaaaaaatcattgtttatttatagattttaaagataatggtgaaggaataaaagaagatgccctaaaggacatatttaatcccttctatacaacaaaaccaattggtgagggaactggtttaggtttatatattacttataatgagattaaaaagaataatggagatataagtgttgaaagtaaattgggggttggaacttgttttcatataaaaattccattaaataaagaggtgactatataatgaaaatactattagttgatgatgagctagaatatggagtggtaatgaaaaaaattctacaaaagaagggctatcttgtagatatagcactaagtggtgaagaagctataaatataattaaaaaagataaaaattatgatttggttttatctgatgttatgatgaaaaatatggatggagtacagctattagatagaattaaatctattaatagagatatagaggttatattagttacaggatatggaagtattgaaaatgcagttgatgctatgaaaagaggagctttatcttattttataaaaagtaatcccattgaaaatttattagaagaagttgaaaaggtaaaggcaagtaaaatatctgtttctgtacaaaaaaataattttgaatttactttggaatctaaaaatagagattttaataatatcataaaaatagcaaaaaaagctgcttgtaaagatgttaatatattaatcttgggggaatctggtgtaggaaaagatatattagctagatatatacatagtataagtccaagaaagaatgagatatttgtacctgtaaattgttgttctttttcagaaaatctattggagtctgagttgtttggtcatgaaaaaggttcttttacaggagcagtagatagtagaaaaggtagatttgaactttcgaataaaggaactctatttttggatgaaataggagatatacctctaaatgttcaggtaaaacttttgaggacacttgaggacaaatctatagagaggataggaagtaataaatctattaaagttgactttaggttaatttgtgctatgaataaagaaccaaaagtggaaatatcaaatggaaatataagagaagattttttttatagaataagtacaataacaataactataccaccactaagaaagagaagagaagacttaactactcttatagaatttttcttaaataagtaccaaattgaacatgataaaaagatacactcgattgataaggaagtaaaggattttttattaaattacaattatccaggaaatataagagaattaaaaaatataataaatagacttgtagttttaagtgaagaaggcaatttatcaaaagacaatttaaatttaatatcaaataatgtatacatagatgataaaataagtattagacctttaagagaaataagaaaagagtttgaatgtgagtatattgaaaaagttttatctttgtgtggaaataatatttcaaatacagctaaaaaattggagattagtagaagacagttaaccaataaaatatcagagtataatattaagtgagaaaaaaacttctcattaagtgagaaaaaaatttctcaaactgtattaaaagataaagagaaaaaatctgtttatctttttttattataattttaaaaattaatatttacaataattattggtaaattcaatactggtgtaaattaaaaatgaaaatttctatgacattaatacatagaatatatattttaaataattggcatagaaaatgctttatatattaataaacgtaataaatatttttaattgcgattaaatatattaagggggattttcatatgaagctagagctagggaatatatttataaaaaatgttgaatttggagaaaagacagaagtaaaagatggagtactatatattagtagcgaagaaatagaaaagatagtattagaagatgaaaggattgtaagtgtaaatgttgaacttgcaagacctggcgaatcaataagaatagctccagttaaagatgtaatagagcctagagttaaaattggagatgaaagcaaaatatttcctggaattataaataaagtgaagactgtaggaagtggaagaacccatgtacttttaggagcttgtgttgtaacttgtggaaatatagttggatttcaagaaggcgtaattgatatgagtggtcctactgctaaatatacacctttttcaaaaacaaataatatatgtattgttataaaagcaaaggatggtatagatactcatgattatgaagaagcagctagaattgcaggattaaaaataggtgcatatgtaggtgaggcaggaagagaagttgagccagatgaagtcattgtatatgagacaaagccattattaaaacaagtaaaagaatatccagacctgccaacagtagcatatgttcacatgttacaatcacaaggacttttacatgacacttattactatggggtggatgctaaacagatagtgcctacatttatgtatccaactgaaataatggatggagctataatatctggaaactgtgtagcaccatgtgataaggttacaacattccatcatttaaataatccagttatacatgacttatataaaagacatggaaaagatttaaactttataggagttattttgactaatgagaacgtattcttagtcgataaagagagaagctctgatatggtagctaaattaatagaatttttaggagttgatggagttctagtgacagaagaaggttatgggaatccagatactgacctaatgatgaattgtagaaaatgtagtgaagttggagcaaatgtagttttgataacggatgaatttcctggaaaagatggcaagagtcaatctatagcagacgctactaaggaagcagatgcagttgtttcttgtggtcaaggaaatctagtggttcatttcccagcaatggaaaaaattataggaactttagattatgttgaaatgatgataggtgggtataaaggatgcttaaatgaagacggaagcatggatgcagagctacaaattataatagcatcaactatagcaaatggctataatcatttgacagcaagatattattaaataagtatttgaatataaagttctgttgatgtaatcgttggtctaattgatgtaataactataaagtgatttggaggattaagagatgagtaaaatcagagtggttcattatataaacaatttctttgctggtataggtggagaggaaaaagcagatattccgccagaaaaaagggctggtgtagtaggacctggaatagcatttcagagtcaatttaatgatgatgcagagataatctcaactgtaatttgtggagatacgtattttggtgaaaatattgagagtgcaactcaagaacttttaaaaatgataaaagaagaaagccccgatttatttattgcaggcccagcatttaatgcaggtagatatggagtagcttgtgggactatttgtaaggcagttgaagaagagttaaatattcctgtagttacaggaatgtataaagaaaatccaggtgtagatatgtttaaattagatttgcatatagtgtctacaggaaattcagcagcaagtcttagaaaggtagttccaataatgacgaaactaggtcttaaattggttagaggtgaggaaataggacctcctgaagaggaaggatatataatgagaggaataagaaaaaatttcttccatgaacttagagggtctgaaagagcaattgatatgttggttaaaaagatgaaaggggaaagctttgaaactgagtatccaatgcctgaatttgatagagttacacctatgaaacctgttaaagatttatctaagataaaacttgccctagtaacttctggagggatagttccaattgataatccagacaaaattgaatcttcaagtgctactaaatatggaatttacgatttaacagatatggattctatgtcaaataaagaatttacaactatacatggggggtatgacagagcatatgtccttgaaaatccaaatttagttgtaccattagatgtagttagagagcttgaaaaagaaggtgtaattggagaattagtagattattttataactactacaggaacaggaacgagtgttggcaattctaagagatttggagaagagttttctaagaaattgttagaagatgatgtagatgctgtaattttaacttctacatgaggtacttgtactcgttgtggagcaacgatggtaaaagagattgagagagctggtatagcagttgttcatatatgtacagtagtaccaatatcacttacaataggagctaatagaattgttccagcagtagggataccatatccacttggaaatcctatgttaggagaagaggaaagtaaaaaaattagaaagaatatagttttaaaagctttaaatgcactaacagaggatatagaagaacaaacagtatttgaataataaaaatataatatagaaataaaaaaagatatcataaaatagtttttgaaaattattttatgatatctttttgctatggatggaatgaagaaagcaattaagtaataaaaatatttatagtaaaacagccaattaaagtataaagaatgaaaaaaataaatagaagattatacataaacaaaaaaagagattttaaaatctctttttattatatattaattattttttaaatttatattttttgcatcagattttctaatagctaagtcaaaccctctaaatctaatcactatagggtcattaagaggagctatctttttcacttcaacttcagtgccatctattagtcctaaggctagaagtctcttcataagtttttcatttccagctatattgtctataattcccttttgtccaagttttaagttgtaaacagtcattattaacacctcctaatgaaaatcattatcaaactttatatttataatatataacaaaaagagtaaattgtcaatatataacaaaaaataaacatactaagttagtatgtttataaaaaatagtatacatgggatactaatagcatctagcaaaaaaccacttactaatggtacaaccaaaaaggcttttggagaatcaccatatttttgtgtcaaagaactcatatttgccaaagcgttcggagtagctcctattccatgtccaatcaaaccacttattatgatggcagaatcaaaatcttttccaagtactctaaagcaaataaatattgaaaataggattataaagattacttgaaaagttactattaagagaataggaggtaataatgtagataattcaaataaatctatattcataagtgataaagttaaaaaaattcccaatgaaagttcttttaaaaaatctataagtttaaaatttaattctaatatatttatcttatcatttaaatttctaaaaataacagctgaaaacatacaagttacaacagagggtaatagtatattaaacgttatatagaagcatctacttataatttctcctgtatttatacaaataaatatgagaagaacctgttccaaaaatacagatggtgttattgtttcggagaagttattattttttatcctattcttatttctaaaaaatttacttccaaatctctttagatttctattatatctaggaatcgacaagcctatatttgatgatggttttaatttatatttatttattagaaatttagctacaggacatcccaatataccacccataataagtcctattgttgcagcagataatccaaccccaactgctccttctataccgagattttctattgtaagtccaaatgcagcagaataaccatgaccaccttccatagatacatttccacacataagccctaaaagaggttcaagttttataatctttgatattgtaatagctaatatattttgacaaaatgccaatactccacacaaaatccaatatctaaataatacactaccacctttctttataagatttatgcttatttcaagtcctatagttgtaaaaaagaaggttataaaatttggcattaaatttccacttatagatatatctgctatattaaaatatttaaaaaataaatttagaaaacaaaataatagacctcctattactggtgcaggtatacagaaattatttaaaaagttaactttattcttcaataaattaccaattaaaaagaagaatatagatagtgtcaaggtttgcactatatcaaaacttaaggtaatcaaaataagtcctcctttgtaattcaaagttttaattatataacttaaattcttatgtattgaaattttattatcaaatgtatattaataaatgtatattaaaaagaatcagtatatataattagatagtcataaattaaattaaaatattttaatgagatgtgacttttttagaatgaaaaaccgtagtatattgatataatagaaataagacttaaaaatctgttgatagtattatttataagtacagtaggaggataaaatgtttgaaaatttacctaagatagatttacattgccacttagatggaagtgttagagtagaaaccatgcttgatatagctattaaagagaaaatagatttaccttcaaataatatggatgaaataaaaaaattagcaaaggtttcttttaattgtacttcactagatgaatatttagaaaaatttgatttacccttaaaagtaatgcaatctaaggaaaatttaaaaagaattacttttgaacttttggaagatgcaagtagagaaaatgtaaaatatattgaaattagatttgcaccattacttcacacccaaaaaggtatgagtgttaaaaatataattgagggtataattgaaggaattagagaagctgaaagtatttatgatataaaaggcaatttaatattaggttgtatgagaacaatgacctcaaaagaggcattattagtaattgaagaagggaaatcatttgtaaataaaggtgttgtagcagtagacttgtgtggtccagagaaagagggattttgtaaggaatataaagatgtttttaaattagcaagagaatatggatataaagttacaatacatgcaggagaagctgcaagtggagaaaatgtattggatgctataaatattttaaaggcggataggattggtcatggggtaaaaattaaagaccataaaaaggcgtataatttagttaaagataaaaaaatattgcttgaattatgtccaactagtaatgtacaaactaagacagtagattcttatgaggtacatccattttatactttttataaagataatttacatgtaagtataaatactgataatagaactgtatcagatataaatttaagttcagaactaaatgttatatttgatacttttaaactaggattagaagactataaaattatttatagaaatgcagtagaagctagttttgcagataaagaaactaaagagtatttgaatagtttaatttaatagataaaaatatttaaactttaaattaagctattaaattgacaaaaatacattgtattaggagaaaaaatgtgaaagattatgaagatgttgtttatattaaactagtcaaaaaagaacttgaagaatggaagaaaaatatattaaagaaaccttctatatttgacaaagcatcaaagggtatacagaataaatttaatggagtattgccagataaatatcatgaaataattacttcttctataaaagtaatgacaaaaaccgtactgtttggatataaatatgctacaaagccaccacttagaaatatgtcattagaagaaagagaaaaattagttttagaaaaagctaaaacttacaagaccacagcaatgattgaaggggcaggaacaggggcaggaggaatcctcttaggtttatctgattttcctttgcttttaggtattaaagtgaaatttttatatgatgtagcttcaatatatggatatgatgttaaagattatagagaaaggatttatatattaaacatattacagttggctttttctagtcaacagcatataaacaaaacttttaaattgatgaataactgggatgaatatgtaaatagtctaccagaagacatcaatgattttgattggagaacatttcaacaagagtatagagattatttagatttagctaagtttttacaactaatgcctggaataggagcatttgtaggattttatgtgaatggaaaattaattgataaattatgtgaaactgctgtgtctgcttatagattgaggattcgagagcttaagttataagagaaattataacataaaaaattagttatacaatatatctatatgtatctaattttgcattgataaaaacaattatggataaaaggtaaagcatgatagaatctaatgtagaggtttgtattttaatggaaaaatttagtttttattgcttaagatacaaattgaattacgaagagaagtaattgggaggaatattttcatgacaaatttgccaaaacaatttgatagcttcaatgaagctagacaaaagggatttataaatgcaaaggaacttaaggaaagtgggaaaaagatggttggagttttctgtacatttactccagttgaaattccaatggcagctggagcaactgtagtaggtgtatgcggtgttagtgaagagccaatacctgatgcagaaagggtgcttccaagaaatctttgtcctttaattaaatcaagctatggacatgcaataacagacacctgtccttatttctatttttctgatttgttgataggagaaaccacttgtgatggtaagaaaaaaatgtatgaagaacttgcaaaagttaagccaacatatgtaatgcatttgccaaatacttcaaaaggagaatttgcctataaactttggaaagatgaaatgataagattaaaagaagaggttgagaaatctttaggtgtaactataactgaagaagatataagaactgctataaaagataaaaatgaagaaagagaacttttaaaagagttttatgcacttggtaaattagaaccatctgcacttacaggccttgagttacataatgttttatatcaagcaggttttaaatttgaccgtgcagaacttaaacattctttaagaaaagttatagatgatatgaaagaaagatatgaaaaaggtgaatgtcctgttcaaaaagataagccaagaatattgataacaggttctcctattggtggaataagcgaaaaaatagttaaaactttagaagatgcaggggcatcagtcgttgcatatgaactttgtggagctattagatcaaacgatttattggttgatgaagaaatagaagatgtatatgatgctttaacacaaaaatatataaatataggttgttcttgtatgatgaataatgacaatcgtattgaattattagatagaataatagatgaatataatgtagatgctgtaatagatgtagttttacaagcatgtcatacatttaatatagaaagttatagaataagagaatttgttacaaaagaaaaaaataagccatttatgtctcttgaaactgattattcaaaatcagatactgaacaattaagaactagatttgaagcgtttgtagagatgttgtaggaataaataaaagtaggaggaactatgtttagtataggagttgactcagggtcagtggcaacaaagggtgtgctatttgatggtgaaaaaattattaagaaaataattataccaactggatggagccctaaaaatacatctaaacaggtctatgagttgctaagtagtgaaattgacaaaaaagatataaaaaaggtggtaggtacaggttatggaaggggagtaatggattttgctgataagaaagtaacagaaataacttgtcatactagaggtatttactttttaaacaagaacataaggactattttagatgtaggtggtcaagatagtaaagttataaatttagatagagatggaaatgtatttaactttataatgaatgataagtgtgctgcaggaactggtcgatttttagagattacttctaaccttttaggaagcgatattgaaagtatagatacattagctaaaggatatgaaccagttaatatatctagtatgtgtacagtttttgctgagtctgaaattgtaagtcttctagctcaaaacatttctactggagaggtagcagcagggatacttaaatctattgcaaataaatccacctcaatgttagcaagaggtgaggtaatagatgaagttgcatttactggagggcttgcaaaaagtaaagaactagtaaaaatgatagaagaaatactgggtaaaaaaatttttattgcagaagatactcaaataataggagctttaggagctgctgtaataggatttagataaaaacatataaaaagaaaatgaaaagctgaatttatcataaataagttcagttttttattttattttgtttatttataaaggaaaactttggtataattgatttaaatgattgtatatttgtaaatacttgatatttagtcatatataacattagaattttaaaaattagctcaaaataagggggagaaagcgtgaaaaaatttacttcaaaaaaagtagcaaggtttgttgcactgtttttaatatctattttagtaatgtcaacaattcctgtgtcagctgacaatagcaatacattgaatcagataaaaaaagcagaatacagtgatacttataaacaatatctaaatgatgctaaaaatggacgtacagaaaaatataatggaattataccaaatccatatcagttagaaggtactcaaattcaaagtaaaggaagaacagctccaacatcttatgaccctagaaaattaggtcttatgacatcagtaaaaaatcaagaggatttaggaatatgctgggattttgctgcaatggcaaccttggaaagtttcttgaagttaaataattatggagactacgatttatcagaagaacacttaagatggtgggcttcagatggtgaatatggatggtctgtaaatgatatggatggtgctttaaattatgaagctatgggatatttaacatcttggtcaggtcctaaattagaaaaagatatcccatacaatggtagagtatctaaagcacaaggagcaaaaaaaccaactaatatgaatacagcacctactgtttttaatgtgacagatgctgtgtgtgtaagtaatgacataaattctacaaaaaatgctatattacagtatggagcagtaacatctggttattatgaagatattaaatatcaaagtgatgaccaaaattcatattattgtccaacaaaaagttttaatacaaatcatgctatttcaattgtgggttgggatgataactattctaaagataattttaatgcaaatattagaccatcaaaaaatggtgcttggttaataaaaaatagctggggagattataattctgagggtggatatttctggatatcttatgaagacaagacacttatgtctgatatagataatttttcaatcaaaggtggtaaaaaaccaaatgatgatgagaagatgtatcaacatgactatgcaagtattgtacctttaatttcaaaaaagataacagctgcaaatgtatttgatttcaatagaggcgatgaaactctaaaatctgtaatgttcttaactgaaagtataggagctaagtatgaagtatcttatgctccagtagtaaatggtatacctcaagaaaacaatatgaaaaaattaaaagaaggtactgcccaatattcaggatacataacagttccaattgattcttttaatataccagaaggaaagggtgcaattgtagtcagtatagaggggaaaaatggagagtcaactataggttctgagtcaaatgtaccaggatatgatacatttaaagcaaaagctaatttaggtgaaagttatatcatagataatactggaaaattctttgatataaatagagatagtaacttctatccgtgtaattttactataaaagctgttacagaaaagtcttctggtgagagtatcccgaatgagtctttaattggtagtgatagatatgaaactgctatcaaagttagtcaaaatggtttcaattcttcagaaaatgtagttttagtaaatggcagttcaatagtagatgcattggcagcaactccttttacatctgctataaattcaccaatattattgacacaaaaagaagctttaaattcaaaaactaaagctgagatacagagattaggtgctaagaaagtatacctaataggcggagaaaattctataagtaaagaaattgaacaacaattaaaaagcttaaatatatcgatagagagaatatcaggaagtgatagatacaagacaagtttattattagctcaaaagttaaatggtataaaaaatgtatctcaaatagcagttgtaaatggagtgaaaggattagctgatgcaattagtgtaggtgctgctgcagcagaaaataacataccaatcatacttgcaaatgaaaagagcgaattgcaaggagctgatgaatttctaaattcattaaatatagagaaatcttatattattggaggaacagcatccctatcaaacaatctagaaagtaagttaaaaaatccaactagattatctggtagtagtagagacgaaactaattcaaagataatagataatttttataaaaaagatactttaaaaaatgcatttgtagttaaaaatggaatcaagaatcaaaatgatttaatagatggattggcagttggtcctttaggagcaaaaactgggtcaccagtaattttagttggtgataaattagctgatagccaaaaagaagttcttaaaaataagactttagaaaaagtaactcaagttggtggaggagcaaataaaaatgcatttaaagagttagtaaaattaaaaagtgctaaatagagtacttaagtattaacatatattagtgtgtattagtaacttatcttaataaaagctgaaaataattactttaaattattgataaataagataatcaatgattgtaaagttttgttttcagctttaaatttatgtagtataagtttaaaaacataaaaaagggttactatatatagaaatatagaaaatcttatattttatatataaataacccatatttaattaactttttatagtgttctaatagatattattgaacttaatggtaaatataatgtgtaagtttcatttaaagttggattagattcatctatatatcttgagcaaagtgtaattgataagctatctgcttctataatttcaccatatagaggacaactgctaaagtaagaatgtacttcaacatatttatttaagttttcttgaacataatcgtaaaaacggttttttgtagtagtagccataaaatcaactcctttattttttattaaagttgaaacttttaaaaagataaatatgagtacttctattagaaactaagttaaaaaataagcaaatagatatgaaaattagaataatatattatttatatcttaattataacactagataataaaaaatgctatataaaattcagaattttcgaaagtttttaagcttatttttaaatatactaataatactattgacattagatagaaaaagtattatattgactatataaattattttagtcaaactggaggaaaaagatgcctaaatcgtattctgataaagaaagagagtatataataaaaagacttaaagaagaagcaagattgtgtatggagcaatatggtattagaaaaactactgttgatgagcttgtaaaacgggtaaaaataccaaaaggaactttttatctattttttcaatcaaaagaattgctcttttttgaggtattgagagatatacatgactctatacaaaaagaaatcttatatgagataaatagagtagatgaaagtattacatgtgaacaattgacagatatatttatgaaattctataggatggttgatagtacttcaattttaaatctcatgataaatggagaatttgagatattggtgagaaagttaccagattctataattgaagaacactttagacatgatgactttgaaattggagagattatatcttgcataccaaatgcaaaaaataaagacatagaaagctttagtggagcatttagagtagtttttcttaccatgctatataagcgcgaggttggaagtaattgttttgaagatgctttaagattaatgataaacggattagttatacaacttatggaatagaatttaaattttgtttgctaataacttttattaaaaattattaacaaacaaaaaaattatattttattgaccatatagtcaaaatagtcaaaaatttgaaagggtgatattgaatgattaaagttgatgatttatcatttagttatacagatagaaattttttacaaaatattaactttgaagtagaaaaaggggaaatactaggatttttaggaccatcaggtgcaggaaaatctacattacaaaagattctaattggaatgataactaattatggaggaagtgtcattgtaaatggagtagagagtaaaagacactcaaataaattttatgaaaatataggagttgattttgaatttcctagtttatatgaaaagttgactgcaatagaaaatttaaaatattttgggtctctatattctaaaaaactactatctattgatgagttattaaaatcagtaggactagaaaatgaagcaaataaaagggtatctgagtattcaaaaggtatgaaatctcgattaaattttataaaagctttattacataatccagatattttatttttagatgaaccaacaagtggtcttgacccgtcaaatagcaaggttatgaaagatataattttatcagaaaaatctaaaggtaaaactattattttaacaactcataacatgttagatgcaacggagctttgtgacagagtagcgttcattgtaaatggtaaaatatctgctttagatacaccacataatcttattatgtcaaaaggagctattaaagttagatatacttactttgataatggagaaaaaacttctgaatgttttctgaacaatactgctaatgataaaaatttgaatatgcttattaagaaaaataaacttttatcaatacatagtagtgaaccaacattaaatgatatttttattgagataacagggaggaatttacaatgaggctaaaaaatcttattttaggagatataaagtttcaatttaagtatggtttttattttttatatctttttttaagtattatatatatttgtattatcaatgtatttccaacttttatgagagaaaaaatagctataattatgatttattctgacccagcagcaatgggattgttttttatgggagctattgtacttcttgagaaaagtcaaagggttttaaattccttagctgtatctccagtaaaagtatctgagtatattttatcaaaggtaatttcattaggagtaatatctagtattgtagctatgtttattgctattacattaaatttagataatattataatatcaactataggtacctttttttcttctattatattttctttgcttggattgatacttgcaagtaaagcatctagtttgaatcagtttattgttttaagtattcctattgagattatatgctttattccaccaatactcaatgtacttcttgacacaaaatcatatgcaaatttgtacccttttaatatatgtatttctcttattagtggagataaaaattttataatgattaatattttaatatcaattataataataatttattttataacttattattttatttgtagcagttggaaaaaggtaggtggagtaaaactatgataaagattataaatgcgtttaaacaagagtttgaacaaattaagagagatgctatgctttttatagtatgtgtttctccaatattatgtggagtatttataaaatttggaataccattaatacagaatatatcacttaacaagttttattatcaattaaatttagagccgtatttcttgatgtttgatttacttttagcttttattacaccttttatgttcttttttgcttctacaatggtcatattgggagaaattgatgacagcatttcaagatatttaatagtaactccgcttggtaaaactggttatcttatttcacgatttggaataccaggtaccttagcatttattattactatgattctacttatctttttttctctaactaaaatttctttcttgttaaacttatcaatttctttattagttttattacaaggagttattatatcaatactagtgatttctttatcatcaaataaactagaaggaatggtaattacgaaattctcaggtgtttttatgatgggtattttagcaccattttttattttaaataaagcacaatatattctgttcttcttaccaactttttggatatcgaaggcatttaaggaagataattatatctatatgtttatttcaattgttatatcattaatatggattttattattatttaaaaagtttagtaaaaaaatagttaaataagaaaatttaatatataaatgtaaggttgacttgacagtaatgttgaaaaatgttacatttaagatgtaaagttaaccttacatgaatggagcaaatatgaaaaataaaataaagatattaagagaaaaattaggattgacacaagaacaactaggaagattagttggaacatctagacaggctataaatgctatagaaactggtaaaaatgaaccttcaatatggttggcatatgatatttcaagaatttttaatgaaccaattgaaagtgtatttttatttgaagaaagtgaaagaaaatcaagagcacagataagtaggggagaatattatggctataagaaagataagaacatttgatgatgaaattttaagaaaaaagagtaagtatgtagaaaacgtagataataagataagagaaatattaaatgacatggcagagaccatgtacaatactccaaatggaggaggattagctgcatgccaagtaggagtattaaagcgattagttgttatagatttaggagaaggacttattaagcttgttaatcctgaaattattaaacaagaaggggaacaaattgttgttgaaggatgtttaagttttccagaagtatggggtaaattaaaaagaccaaaaaaagttacagtgcaagctctaaacgaatacggtgagaaaatagaaattaaaggttcaggttttatggcaaaatgtctttgtcatgagatagaccatttaaatggtatagtttttacagataaaattattgaacatgtaaaattgtaagatagattggttattgaatttataaaatattttatagtaaggagttaaattatgagattatggcataaggatttaattgatgtattacctaaaaatcaattagtaagtcaatggagagagctacttgctataaaaggttctatagataaaaaaggtactccaaaccatctattagtgaataaagtattgaattatagtatagatgaatttaaattttatacaaaaattgtacatgatgaaatgttaaaaagaaattataaacctaatgaacttaaatatacaagtatattaaaatggaaaaatagaaattttgcaaatgatatatctaatgaacatagtttaaatttagaaaatttatatgatgattggcataataaaatgtatttaaagcaatgcttatataatttagaagaaaaagcaacatgtggaggaataccaataaatgaatggaatatattactttgtaaatatagtaaagattatgaattgtggtctggaaatatcatgttttaattactatagattaacattatagtattattgtatataaagaggtgattatttgtataataaaataaaatatattccaataaattgtgaaatagcttgtaataaattaaaaaggagtatgccatataaatgggatttaaatatttatcgtggatgtgagcatggatgtaaatattgttatgctatttactctcataagtacattaactccaataattattttgaagagatttatgtaaaaacaaatatagtagaaaaacttgagagacaacttaaaagcagtaaatggaagaaagaagtaatcaatataggaggagttacagatagttatcaaccaatagaagctgactataaaattatgccagaaatattaaacctgctgataaaatacaagacaccagctattatttctacaaagtcagatttaattttaagagattacgatttaattgataagctatctaggattacatatatcaatgtagcatctacaattaccacagtaaatgaagatacacaaaggcttattgagccaaatggtgtggattcaatgagacgatttaaaatgttaaaagaatttagaaaaactaacgcatcagttggtctacatattatgccaattataccatatattacagatgattttgataatataaattcgctatttagacatgcaaaagaatgtaatgtacattatgttttacctgggactttatacttaaggggtataactagaggtgttttttttgactttgttaaaaaagagtttcctgaattatttgataaattatcaatactatatagtgcaggttcacttaatagggagtataaaaatcaattgtataaaatggttaatgaacttagatataaatattctctatcaagcagttactctaaaataatgaaggaaaagttaaaaaactcaggagatggacagatatctttttttgattagttttatataaaaaatttttttttactatgatgattaaaatttattaaaattaaaatttattgacaaatataaaatttaaatatataattgattcataaaataaaaatatgaaaggatgatgttgttcggtgatatttgatatcataaaatcgttgatataagtattgctggaaaagagtgaataaaatcaaatttaataagcaaacaaagtaaagctatagttttattgttgtgcttaaaaatatttggttctattttactcttatttaaactcatctttttgaagttaaaccacagagtaaactctgtggtttttttattttaaaaataaattttaaggagtggtatgttttgttaaacaaattatgtatgtatttagaaagaccagagctttataaacaaagtgaaattaatttttgggatgatgagtatatttcaaaacaattattaaaagcacatttagacactaattttgaaggagcaagtagaaattttaactttatcgaggattctgtaaattggatagttacagttgcaaatccagttaattatcctaatttacttgatttaggttgtggtccaggtttatatgcagagaaatttgcacaaaaaggttataaggtaactggaattgatttctcaaaacgttctattaactatgcacaaaatagaaataaggagactaatttaaacataaattacttgtttcaaagttatttaaatatgaactataatgatgaatttgatttggctactttaatttattgtgattatggagctttgtcaactgaaaatagaaggttattaatggaaaaaatttatgatagtttaaaacctggaggaaaattaatattagatgtatttacaataaataaatacaataattttgaggaaattaaatattgggaaataaatgaagatggaggattttggagtaatgaaaaatatatgtgtctacaagataattgtaaatacaatgattataatacattagaacaaactcttgtaataaccgaaaaagatgaaaatgtattttatgtttggaatcactatttttcaaaagaaagtttcttattagaagttgaaaatattggatttaagtctgttgagttttttagtaatgttaagggtgaagcatattctgacgatagtatgactatgggattagttttacaaaaataataatttttttaaaatgaataaataaaaacttgaaacctttaacaataaaataacataagaaaagcttacatattgaaaaatggaaacttttatgttatttttagtacattacaaattttcttatataaaaatcaatacttgaattattatttttatgtgaaatttatctatagtatatttttataaacaagtaatgttattaaaattaagtatatagttaaaagtgtatagcaaaaaggctgttatattaatgttagaggttcagggaaaatatataaagcaaagatatttacagataatgtagattgcacagctataagttagataatagaattatgtaatcaagaatttacaacaaagtataagataaggataatgctaaattgccatacaggtgctagatgtgtaaatggatttaattaatactattgataaagtgcaacaagcacataaaccaattgatgagattattaaaactataagagatatagttgacataattaaaatattggaacctatttataattttaaatcaaatcaataatgattaagattaaaataatattaaggtatcaatgttataagagtacaatataaggagtactatatagtactccttacttatacatattaggcaataggaaatcttttcatagttaaattttcaaatattttttagggaactttataattgagaattaagggtatagtatgtgatgaacttactaaatttataattaggttatataatggaataatcatcaatagttttactttagggaaaatatatgcttaaggaagtatagcttactaatattattaaaatgtatatttaaaatgataaaaaaagaattagacaagtatttagtaaattgattatgtaaaattctatcaagcaggaaccctatgactttagtcatgggaggttcagtaggtaacttgttgaattaagtttatattatttaaataaactacttaatttagataatataaaaagtcagaattttaagaatagagctatataatcttagctattaggagaagtactatgataggaatatattttagtggaacaggaaattcaagatactgtgtagaaaaatttttacaagaatatgatataacagcaaattcttattctattgaagataatgaacttttacagcacatcaataatcatgagaatattatttttagttatcctgtgcaatatagtaatgtgccaaaaatattgaaagattttataataaatcattcaactttgtggaatggtaaacgtgtttttattattgcaactatggctctatttagtggagatggctctggtgtgttagctagaatattaaaaaaatacggtgctataactgttggtggattacatgtgaagatgccagatagtataggagatgaaaaggtattaaaacattctttagagtataataaaaagcttgtaataaaagcagaaaagaaagtaactaaagctgctaaaaaactgaaacatgggtcaccaccaaaagaagggttaggttttttgagtcatattgtagggttatttggacaacgattgtattttatcaataaaacaaatatgtatacagataaactaaaaattaatactgaggaatgtattgtatgtggtaaatgtgttaatttatgtccaatgaagaatctagtaattaaaaattgtatgattgttgcaaatgggcaatgtacaatgtgttatcgttgtgtaaataattgtgcaaaaaaagcaattacattgttaggtaaaaaagttgttgagcagagcaatattaaaaaatatatgtaagaaatttaaagttttattgaatgtaaattgatgtatattttatgttggaaagagaggtcaaataatggaatactacatagttgattcatttgcaactaaactatttaaaggaaatcctgctggagtttgtgttcttgacagaataatacctttagagttaatgcagaaaatagcagaagaaaacaatttaccagaaacagcatttgtagttaaaggtaaaggaaattatgaattacgatggtttactcctaaagcagaaattgatttatgtggtcatgcaactttagcagcagcttatgtaatatcaaattttattgatgttaatgtaaaaaggatagatttctttactcaaagtggaaagcttgaagttacacgaaatggaaatctatatgaaatgatatttccagaaataatgcctattgaaatagagttatcaccataacaagctaatttgataggctgtgtaccaagtgctgtctattcttcaagagatttaatcttattgctaaacagtgaacaagaagttataaattataaacctaattacgcacaattgcgtaaattgacagactggttaggtataataatcacaccacaaggaagtaatacagattttgtatcaagatatttttgtccagaattagattcagaagaccctgttactggttcatcacattgtaattttattccatactggtctgaaaagttgggaaaacacaaaatggtagctgctcaactttctaatcgtggtggtataattcagtgtgaagtgttgaaggataatactgtaaaaatttctggtgaagcagtcttgtttatgcagggaacaataaagattgatatttaaataagtataataactaatttattatgaaaaataattaattttcttagtgttaacaataataaagtagagttaaaaagcttgatttcacttaaatcaatatgatagatgttgatactaagattgacaagcatgattaaaaaagataatatttaatctataaagataaaaacacagtctggttggtagtccagacgcagcaatagctgtcagtaacctgcctccttggttgtccgttctttagaaagtaatttaaggaggaactagcgatggacaaaattagtggaaaattaacagtcttatttgaagaaccattttgggtaggtatatttgaaagacaagatggtaaaaaatatgaagcatgtagggtagtttttggagcagaacctaaagaagtagaagtgtatgaatttatacttgaaagatttttctcattagattttggtagcattaaattagaaaaaaatgtgaccaaagacaacattggatacaaaagaatgcagagaaaagtaaaaaaggaacaagaaaaagaaactatagggactaaggctcaaaatgctcttaagcttcaatatgaagaaagaaaacaggatagaaaaaacctagctaaaaatagaaaagaagaagaaaaagaaagaatatttaatttgaaacaagaaaagagaaaagctaaacataagggtcattaattttaattaaatatctttttaataattgctagaaaaaggtgtataaagtttttaattttatacaccttaatttattgaaaagaataaggttttatatttcaattactttaaaatataaaaatatactaataaaaattgtaaaaatagtataaatggtataccaaatgtaaatttaatgtgtttagttttatgtctaaaagaatacattccaatcatagaacctatactacctccaattactgctatagacataagagtagcttcttttattctccattcgtttctaattgctcttttcttatctatgtacattgaaaagaaagcaatagaattaatcactataaaatatattagaataaaatttttcacagtcttgcctccataaaaatatattatacattataaaacaagatatttgttttggaaagttaaatttgtaattagtacatataaaatatctgataagaataaatataatattaattggaaaatttaaaaaaattaaacaattagcaaatagggggtatatttataagacacaaagtgataaaatctatttagaaaataatgtaaaataacaggaggataaagcaaaatgaaatttatagtagaaaaagaagtttttgataaattagaaaatgtatgctttggtgtagtagttgcaaaaggaatagataatactaaagaaatagaaagaataagcaaccttttagatataagtatagatagagtagaagattacttcaaagataaaaaagtaaaggaatcagaagaaattataccatatagagaggcatttagaagtctaggcatgaacccaaataaatttatgagttcgatagaagcaatgacaacaagggttgctaagaataagaaacttcctcatataaatcctattgtagatttaggaaactctatttctttaaaatatttacttccaatgggtgctcatgatatggattttagaaatgatgatgtatatgttagattttctaaaaaaggggataaatttgtaccatttggagaaactgatgttgaattaatggaagaaggagaattaatttattcagttggagacatggtaaaaactagaagatggatatggagacaaggagaggaaggaaaaattactaatagctcaaaaaatatattttttcctatagatggttttactgatgctaatttagataaggtaatgagtgcaagagaagaattagcaaaattgttaaaggaaatatttaattgtgaaatcaaagtaggttttgtagataaagataatcctgaaatggaaatataataagttgttgaatacttgttaagatattatatttacttaatgatgttaaaaaggtattaaaaaagaaaggtcgtagtaaatttgaaaaaaactataataaagaatgtaaatccaatgattgaaaataagtttataggactttttgaaatagagtataaaaacaaattagatgaagataaggtttggatggtagcatcaagaaaaagtagtgagcaattaaaaaatatttatttgaagaatgaagaagatagtgtagatgcagttgtaatagttgggcttcataaaagtagtaaaaaattaattttaataagacaatttagagtacctattaatggatatatatacgagttaccagcaggtcttgttgatgaaggagagtctatagatatttctgttgaaagagaacttagagaagaaacaggacttactcttttagaaattaaaaaaaataaaagtattgataaagtttatttatctcctggaatgagtgatgaatctgttgcctttgtttattgtatatgtgatggtgatataacagatgaatttttagaaccagatgaagagattgaagcgcttttaatttcgcaagaagatgcaaaagagattttacaaagtaatcataagatagacacaaaagcatttttgattttacaaatgtttgtgagtttaggagctaaattatttgaatagatatatagaaaagaggttatatagaagagtaaaataataaagtttattttacttgtataaattataatctctttttttatacaataaagtataattttgtgtatttttaaataagttacttgactcttaaattttcataatatgttataaaccaatttaagatactacaataattaaaattccaaaattatttagcatatttgcaattaaaatgagaaaaggtaaaggctgaatgattgaaaaatttgatgtaaaatagtagattagtttaatattatagtttgtagggttaaaaattagaaattgtaaaggagataaattctatgaaaaaattagttattattttaattagtatcattagtgtggttagcttgacagcttgtaaaaaaagcaatgaaagtaaatataataatttaaacaacaaagaatcaggacaaacaaccattgaaatggacttagataaaaattatgatacttcagacccatttgttaatgcacgtttgttttgtgtgtctaatgatatagatgttttagacacagagatttcttttaaaatggatggagatagtggtattgtggaaataaaggacaataaaacagatgaaactttatggagtaatacatggcatggaagcgttgataatgatacattcgcaatttctctttctaatatacaaaaagagaaagagtatgctatatgctttaccggaattaaaataaatcatgcagttgtaaaggttacttttgaaagcaatttagttaaggagaaagaaaaaccctcaaaataaattccagcttgtctataacttgatattcagtacataaaagcagttgatatttatgattgactgctttttcctatcaaaaaggataggttgtgcatttttacttgaaatagtttatgcacatcaaaagttggtgagcatgatattggaaatggtaagcatgaaatcttgataacacaaggaaataaatttaagttttcaattaagtatatttccataatttagttaacaataagctaattattatttatattttgatatataaataataattgtggcaaattttaaaaaatcatatattttttgaactaaataaaaatttgtttttattattttaaattagaggagattcttgaagatatattatttttaaaaataagtatagtttaaaaattcaaaaaaaagatggcaaaatatgtcccaagggacattgagtaaaataaatgatttcagcttatttacactaaaaagtacatactaaatgaggggtgaaataaagaaaaatgatatactaattgtcttttgataataaaaaaacatggaatttgattatttaatcaagaaaaagtattgaacaaatgatttatttagtgtacaataatcatgtaaaaacatagtaatggagggagacatttcataatgaaaattaaggtaggaatgaacggatttggaagaataggaagagctgtattaagaatagctcaagaagaattaggagataatatagaaattgtagccataaatgcaagagcaacaacagaatctttggcacatttatttacatatgattcatgctatggaacttttagaggtgaagtagaggcaaaggatgaagacactctagtagtaaactctaaagagataaaaatattaagatatagtgacccagaagaattaccatggaaagaactgggggttgatatagtaatagaatcaacaggattatttacacaaagagaaaaggcagaaaaacatattaaagcaggagcaaaaaaagtaattataacagctccaggaaaaaatgaagatataactatagttatcggagttaatgagaaagaatatgataatcaaaagcacaatataatttcaaatgcatcttgtactacaaattgtctagctccttttgctaaagtattggacgaaaaatttggtatagtaaaagggttaatgactacagtacattcatatactaacgatcaaagaatattagataaaagccataaagatttgagaagagcaagagcagcggctgaatctataatacctaccactacaggagcagcaaaagctgtgtcaagagtactaccacaattagaaggaaaattaaatggtttttcacttagagtaccaacaccaacagtttcacttgttgatttagtgtgcgaacttaaagaaaacgttacatctgagcaagttaactctgtgttaaaagatgctgctgaaggagaattaaaaggtgttttaggatattgtgacaagccacttgtttctatagattataaaggagattcaagatcatctattatagacgctctatccacaatggttatagaagacaatatggttaaggtagtttcttggtatgataatgaatggggatattcttcaagaactgttgacttagtaaaatatgtagctgaaaaattaaaataatatatatttcttaaagcaaattttaaaaaaattttttgaaaaaattatataaaactaaaaaaaaagattatgaaaaatattgaaggaaaaattttttcataatcttttttctttcatgcaaaaagatacaagttacaacttatatttgcatattaggtcgttagagaagtatatatatatttagtaaggaatcatactttttataaaatgaaagataagatgtcgaaaacttgcataaatctgaaaaatttttattattaaaatactgattttcattttaaaaatgataaaaaaatgacaaataaagttgcaaatagtaatacttataagtataattaaaaaagagaaaaggttttgttaaactttataacaaaaaaagaagggatgattcaaaatggagaagttaacagacaggagacaggttaaggcagtaagcatggaaaccttcattttcctaatattactagtagttggttttgggtatgttggtagtattatgggagcaggaatgatgttcaaagtaataatgagtacagcacatgctttactattggagacagttttcttaattatggctatggcagttcttgcaggcgcattaagcgcactactttcagagtttggagtaatagcgttaattaataaaattttcgctgtatttatgaagcctttatatggactacctggtgctagtatagcaggagctataacaacttatttatcagataatccagctattataccttttgctaaagataaaacattcacacagtattttaaacaataccaagttccagcattatgtaacttaggaacagcctttggtatgggacttatcttaacaacatttatgatttctcaaggtacagaatatgtacttccagcattaattggtaatttaggtgcaattataggtagcgtcataagtgttagaataatgttgacatttactaagaagttttataaatacaatccggaagaagataaagcaacaggaacattagagaaaaaggatgaatttagagaaatcagagaaggaaatgtatttcaaagagctttagatgcaattcttgaaggtggtaaaatgggggtagatatgggaatggctataattcctggagtcctagtagtatgtacattggtgatgttattaacttttggaccatctacagaccctgttacaggtcaagaagtttatacaggagctgcatatgaaggaataaaattacttccagttattggagataaacttggatttatattagaaccattatttggatttacatcaccagaggcaatagcattccctataacttcattgggagctgttggtgcagcaatgtctctagttccagagtttataaagtcaggagctataactcctaatgatatagcagtatttacagctatgggtatgtgttggagtggatatttaagtacacatattggtatgatggatgcattaaatgctagacagttggcaggtaaagctattctttctcatacaataggtggtttatgtgcaggagcagcagctcactttatatttacactcgtaggataaacgtaatcagctaagataaaaaataatatacaaaaaaatggttgttgatatgtaataagaatttacatatcaacaaccatttttttctgactaaagataatttataatacataaacattaagtggatattagacttaagttatatttatgtaaaaagtaacaaaaatctgtagaaatttatgacaaaatttagtacactaactatatgttcttatttaaaatttaaggttagaattaggaattacctagtagagtaagctttgattaataaaagaatcataaaataaaaatattagtcataaagattataaataacttacttaaaataaagccatagaacttacaaaaattaaaaaagcatataaatatggaggggtacaatggatgaattatttcatataggaattgatgtaggttctacaacggtgaaggttgtggtacttaataatagtaataatatagttcataaagaatatagaagacattattctgatgtaaaaaaatcagttaaagaagtactaaatggtatatatgaaaaattgggagatataaatactaccattataataactggttcaggtggaattggaatatcaaaaaaattaggtgtaaaatttgttcaggaagttatatctagtacaaaatcaatagagtattttcatcctgaaactgatgttgtcatagaacttgggggtgaagatgcaaagataacatatctaagtggaggaatagaccaaagaatgaatggaatatgtgcaggtggcactggagcattcatagaccaaatggcatcacttttaaagacagatgccagtggattaaatgaacttgctaaagggtataatgttatatatcctatagcttcaagatgtggtgtttttgctaaaacagatattcaacctcttataaatgatggagccaatcagactgatatagcaatgagtattttcaatgcagttgtcgtacaaactgtgagtgtcctttcttgtggaagaaaaatagaaggaaatgttgcgtttttgggtggtccattgtactttttatctgaacttagagaagcatttaaaagagtattggatttaaaagatgaaaacataatcttcccagaaaatgcacaactttatattgctattggagcaggattattatcagtagatgaagataatatacaactaaaatctctaatagaaaaattggatagtataaagaatattgaagatggagaagtaaatttattagaacctttatttaaagataaaaatgagtatgaagaattttcaagaagacatgaaaaagaaaaaataagttatgtggacataaattcaataaaaagcaattgttatttaggaattgatgcaggctcaactacaactaaagcagcacttattgatgaggatggaagacttgtatattcttattataatagcaatgaaggaaatccattaaaaacaaccattaaagttataaatgaagtatatgatatattaccaaaaaatattaaaatattgagttcaactgtaactggatatggagaaggtcttattaaaaaagctcttaaaatcgataacggagagatagagactatagcacattacaaagctgctaaatttttcaataaagatgtagattttatacttgatattggtggtcaagatatgaagtgcctaaaaataaaagatggagtaattgataatataatattaaatgaggcttgttcatcaggttgtggctcatttttagagacatttgcaagttctttatctatgacaatagaagaatttgcacatgaaggtatttattctcaaaatcctgtagatttaggttcaagatgtactgtatttatgaattctagagtaaaacaagctcaaaaagaaggtgcaagtgttggagatatatcagcagggctatcttattcagtaataaaaaatgctttatttaaagtaataaagattagagatttaaatgagattggtaataatattgttgtacaaggtggaaccttttataatgatttggtgcttagaagctttgaaaaactaattggaaaaaatgtaattagacctaatatttcaggaattatgggagcttttggttcagcacttatagctaaagaaaaatatgaaagtggatacaaaacatccttgttatctaaggaagagttgaataatatcaagctagaagcaagtgtaactagatgtaaaggttgttcaaatcattgtcttcttacaataaataaattttctgataatgaaatttttatttcaggtaatagatgtgagaagggtgaagctatttatggtgataaaaaaataggattagaaaagaaaaaaccaataaatttatttaagtacaaatacaatagaatttttagatacaaaccattggaaaaagaagaagcaaaaaatggggaaatagggataccaagagtattaaatatgtatgaagattatccattttggtttacttttttcaatgctatgggctttagagttgtactttcagataggtcatcaaaacagttatatgaaactggtataactagtattgcatctgaaacagtttgttatccaggaaaattagttcatggacatatagaaaatttaattgcaaaaggtataaaaaatatattttatccaagtgtaacaaatgaaaataaagaggattcaaatgcagataattattataattgtcctgttgtaatatcatattctgaagtaataaaaaacaatgtagagaatataagaaataagaacataaattatataaatccatttataagtctaaatgataaggaaaaattgaagaaaagactatatgatgaattatcaagacatttttctgatataaaaataactaaagaagaagttaatcatgcagttgataaagctactgatgaacagaatttatttaaaatggagatacaagcagcaggtgaaagagcacttaaagaaataaaagaaagaaatatgaaggggattgtgttatgtggaagaccatatcatatagacccagaaataaatcatggaatgccagagcttataaattcattagatatggcagtgcttactgaagactctatatgtcatttagccaatgtacaaagaccacttagagttgtagaccaatgggtatatcattcaagattgtataaagcagctagttttgtaagagataaaaactatttggaacttgttcaacttaattcatttggctgtggattagatgcagtaactacagaccaggttcaagaaatacttaatgaaaaatcgaagatatatactattataaagattgacgaaggcaacaatttaggagcagctaagataaggatgaggtccttaaaagcagctatgtttgagagagaaagcaaaaatatagatgtaaaaaatataaaggtaaacaggatacagtatgctaaaaataatcagataacgaacaaacatactatattagcaccacaaatgtctccaatacatttccaatttcttgaaaaagctgttaacttaagtggttataatatagaaattctaaaagatactgatagtagtgtaattgaagaagggttaagatatgtaaataatgatgcatgttatccagctataatagttgtaggtcagctaataacagcattaaaatctggcaaatatgatttaaataatacttctgttactataactcagactggtggaggttgtagagctacaaattatattggattcttaagaaaggctatatatgatgctggatttaaagatgttcctgtcattgcacttagtgtaaatggaatagaagatagtggtataatggataatatatcactaaaattaatcaatagactctttatgtctgttgtttatggtgatttgctgatgaaagtactatatagagtaagaccatatgaaaaagttactggaagtgcaaatgctctatatgaaaaatgggttgatatatgcaaatcttctcttgttaaagcaaaaatttctgtatttactagaaatataaaagatatagtaaaagaatttgataatttagagatactagatatcaaaaaaccaaaagtaggtttggttggagaaatattggtgaaattccatccaattgcaaataataatttagtagatatattagagcgagaaggtgctgaagcagtcgtgccagaccttacaaatttcttcttaagttgtgcctttaatactatatacaaacacactcatttagaaggaagtagaaagagtagaatgataggagaagcatttatatacataactggaatatatcaaagagtatataaaaaagcacttgataagagtgagagattttatgctccagccaatataaaaaatgttgctaaaagtacagaaccagtagtgtcattaggtaatcaaactggagaaggttggcttttaacaggtgagatggttgaattattaaatgaaggtgtagaaaacattatttgtatgcaaccttttggatgtttacctaatcacataattggtaagggttctataaaagaattaaagaggttgtataaaaatgcaaatataatacctattgattatgacccttctgcaagtgaggtaaatcaacttaacaggataaaacttatgctttctaaggcttttaaaaatatataagatttatattttgatatgttaaaagttaatgaatttaaaaatatactctatattaagtatctataaaaaagagttatcctattttttagggtaactctttattagttaaaaaattatatgtatactgatattaaaggggggaagtaatatgagtttagtatatgatgtttataaatcaaaattaggaaatttgtacatattaagtgaagatggttttatagttagtgtatacataggagatgaaaaatttaataatttaaaaaatgaatgtattaaaaaaggaattgatataaagataagtaaggaagatttaaaggaagcaataagccagatagatgattactttaatggaaaaagaaaagtctttaatttaaatattcgtattgaagggactgaatttcaaaaatcagtttatagggaaatgttaaaaataccttatggagaaacattgtgttattcagatatagcaagaaatataaacaatccaaaatcagtaagagcaataggacaagcaagtaaaagtaataaaattccaataataataccttgtcatagagtagttggcaaaaaaaatattggtggatatatggggaatcattctgatttgaaagagatactattaaatttagaaagacagagttaacttagaaagaaatgtttttattgttaatatttgatataataatagtaaaaagaagtattttttacaaaaacaatgaagaatttattttaatttacaaaaatgagggggaattttaatgtgtgataaagttatagcatcaaaatatcatgagaagggatttaattgtgcagaatcagttataaaagcatataatgaggaatttaatacagatataccagtttgtttaggaagtggactgggttcagggtgtggggttgctagtttatgtggtgcagtaaatgcatcaaatataataattggatacgtaaaaggcagaaaccacgaagatgaaagtactaaagctaaagtatatgctaaagatttaactacaacagtaagaaaagagtatggttcagagttatgtatagacctaaaaaaagatttagttgcttgtagagaaataatggatttcgcatatgatagtctaaaggaaactttaaaaaaagaattataagaaaataagctatcaagtataaattatttgatagcttatttttatagtcgatactaaataaatcaaatatattttagaattattatttgtaaataaacagcaaataattttaggatttttatttaatatagtttttatttatatttatttttgaatatgttatactttgtttaaataaatatttgtaatgagggagatgagaagattgaagaatctcaatttacttattaataaattatattcaaaaaatcataatgaagcatataaaacttttttattcttagaaaatgaaagtttaaaatcaaatattacatattgtttttttgactcattcctagaaatgattgataacgaaaactcatatattcgaacaaggggattgttattaatctctgcaaatgctcagtgggatattgataataaaattgaaataaatatagatagtatactaagtcatatcgtagataaaaaaccttctgtatcaagaatgtttattaaatccatacctaatattacaaagtataaagaaaatcttattaatcgcataaaaatggaattaagtaatgcagatataagtatttataataataatatgaaaccattagtagaaaaggatataaacgatacattatctaatattagttaaatattaatatagaaattgaatattatctagttacaattatttataactaagataataaaacaacaatggtgctaatttatatgtataaattaattatgaaaaatttatataagtaaaatatattaacataaaggtaaaattttgtatactaaaagggaatatttacagtttaatggcagttttaaaataataaattaaagctgtcatttttatttaaaaatttttagaaaaagtacaatagtgttaatgtgtgaattagataaggtgtatataataatttagatgatatgatataaaatatgttgtaaattaaatgttttctttgacaatatatacacaaggatgataatatctatatgaataaaagatagtgtgtaatttgataatatgtaattataacattatgatataattacaataaagtatgtaataatctgtagaaatttcaagctagttatctaagttttcggataactaaatctaaacggaatacataatgtattaaataaatgatgatactaaaatgatactatttttatagaaatttattgaggtatataattgatgaaaataatatattaaattatataatatattgagttttacataaaagcgaaggtgggaataaaaatgaaagaaattgctgatgctataacatcagagtatttaagctatggtatcaatgaagatattagtatctatgaaggtagattttgcatatatttagataaaaaatatagatgtaatgggaaaatttattataaaatgacacctccaatatctataagttttaaagcagacataggttgtgttgaagagatagacaatgaagatgacaatttagttttggattatgataatgctattcttgaagttcatggatacaaaattatttctataacaataaatactttaagtgaatttagtgtagaaggttatatcaatgatgactgcataaaatctaagaactcctatgttgaatatgtagattttaatataataaacttagataaaatacctggaaaactaattaaatacaatgataaggtatacgcaggtagaattgaatttgatataaatgattatgttgtaactatagacaagcgatatgattatagaaaagaattaaaatcagaattaaagtctaaatctggagcaataataactcatataggtaggattagaagaaaagatggtagaatttttagaacaaataatacaataaatcttttagatagaatatcaacagctttgagttttatgtgtggaagatatgtagggttttgtttggccaaagggtatagaagtggtaatgaagtttatagaatatggaatgaaaatcaaatatctccttttagatatgtaccaacatggtcagatacactttcaaattatcataatatggaaaaatatataagccttatgtgtaaaaagctagaagatttttattatggttctgctataaagagtgttgttgattggtacatagaatctcttggaagtgctaccatggaaaacaatataatatctgtacaaattgcacttgaaactttgtcatatgtaattctagtggaacaaagtaagatacttacagatgaagcatttgactgtaatttggcatctaaaaatataagactcttacttgatacatgtaagataccatatggtaaacatgaattaaatatatttgataatataataaaaaataaatttgatgatggagtggatttagttatttatttaagaaatagcatagttcatccaagtagaaagactcatagagctgtgttagaggttgaagatatttggaatataatttcaataggaacgagatatattgaacttgttttactctttattttaggttatagaggagaatattcaaacagattagtagaaaggtgttatggtgaagtggaagttgtaccttggaactagatttttatatttattttaaaatatatattgacatatattgccttatgctataaaatcaatatcataataataattcagaataacattaaatgctaagaaaagaaatagtaaaggtagttaatcttaaacagagagtttccgattggtgagaggagcaatagattttactttgaacacatctttgagcaggactctgaaagagtagaaatactttattaggagatttccggaatccttgcacccgttatagtgctagagtataataattttattgtacttaaagaggttagtgtcgtgaggcattaatgaacagaggtggaaccacgagagttaactcccgtcctctagcagaagctagaggcgggagttttttaatataattttttaagcgcgcagagaattatattgcaatagatacactttttaaaaaataatcaaaatattttaaaaattaaaaggcgagggagaatattatgaaaaatatattaaaaaaagtaggaatatttacaattatgttaggtttattaggtggagttgtaggttgttcaaaaccagataatgaaaaagataaggatgcttcaaaggaatctaaaaaagaagtagttgtagggtttgataatacgtttgtaccaatgggatttttagatgaaaagggagatacagtaggatttgacgtagacttagctaaagaaacatttaaaagacttggaatggaagttaagtttcagcctatagattggtcaatgaaggaaactgaattaaatgattcaaaaactgtagatgtattatggaatggatattctataacagacgaaagaaagaaaatagtatcatatacagaaccatatttacaaaataaacagataatagttactctaagtgattcaaaaataaattcaaaagctgatttaaaagataaagaagttggaacacaacaaggttcaacagcacttgatgcagtggaaaaggataaagattttatgaatagcttaaaaggtggagcaccagttctttatgatacttatgataaagcacttagagatttagagataggtagaactagtgcagttgttggtgatgaagttttaattagatattatatgggacaaaagggtgaagacaaatacaaggtattaaaagacgattttggattagaagattatgttgtagcaacttctaaagaaaatccagaactttgtgagaaaataaataaaacattaaaagaaatgaaaaaagatggaacttttgacaaaatttatgataagtggtttaaatagaagataagttagctgttaagaagggggcactaaaggcatgttacaaggtttagagatagttatagcaatgttttgtataacattgatagtatcaattccattggggattggagttgcatttttaagattatcaaagaataaattagtaagtggtattacacaatgttatatattgataatgagaggtacacctttacttttgcaaatgatagtcatattttacggattacctcttttaggaattgtatttgacagatttacagctggagtagtagctttcttcttaaattatgcagcatattttgcagaaatatttagaggtggaatacagtcaatcgatagaggacaatatgaagcttcaaaagtactaggatttgataaatttactatgtataagagagtaatctttccacaagtttttaaaagaatactagcacctatttcaaatgaagtaatcacattagtaaaagatacatctttagtatatatattaggattaaatgatattttaagaatatctcaaatagcaatgaacagggaagcaagtctgttaccattatttgaggcaggagcgatatatcttatatttgtagctatacttactaagggatttgaattacttgaaaaaaaatattcttattatagataaagttacaatattataggaggaggttttttatatgttgaaaatcaaaaacttaaataaatcatttaaaaaaaatagagtacttaaagatatttcttttgagttagaagaaggtcagattggagttttacttggtaagtctggtgcaggaaagaccacaatattaagatgtataaatggtcttgaagaatttgatagtggagagattataatagataatgaggtaataaaaaataagagagatatggcaaaaatacgaggaaaaataggtatggtttttcaaaatttcaacttatttcctcatatgacagtccttgaaaatataattgaatccccagttaatgtttttaaagttcctagaaaagaggctgaagagagggctagagaacttttaagattagttgatttagaagataaattaaattcttatccatttgaattgtcaggaggacagcaacagagagttgctatagctaggtcatgtgcattgatgccaaaagtcctttgttttgatgaacctacttctgcacttgatattgatactattcaaagagtagtcaatataatgaatagacttaaagacaaaggtatgacaatattaataattacacatgatgttgtcttctcaaataatgttgcagataaaattataagtataaaagatggtatagtagaaaatgttcaaataaaagaaaaaattgtttagagttttataaatataaactagggtagaattttataatataaataaagggcaagtaaaatcaaatatactatgcccttttgttatctcaaaatttaatcttatattttatgtttaagttacattataatttataataaaaataaaaggactatttaaatatataatgtgaataaatgtttaataatttgaaatatgataattttttatgttgaaagcttataatgattatgatataaattggttatagtatacaatttatgggtataacaataaaaaattagaaaggaatttttataaaatgattaaattatatggatatacaaaatgctctactgttaaaaaagctaaaaattggcttaaggaaaataatttagaatttgaagatatagatatggttcaaaaccctcctagtaaagaggagttaaaatcaatttataagactagtggatatgatataaagaaattttttaatacaagtggtatgaaatatagagaattgggtcttaaagatattgtaaaaactgaatctgatgataaacttttagaaatattggtaagtgatggtatgcttattaaaagaccattacttttggatggtaaaaatgtattattgggctttaaagaagatgtatggaaaagtactttgctaaaagaagattaggaagagataggtgtgttgattaaaattattaattaatacacctataaatttatgtattaaatctaatctttataaatattaattagcaaattcaaatcaaaaaaattcatatcaacaaatatattacttcttattacaaattatatcatatgttttatattaaaatattataatattacaacgaattgttacaaaattacttattattaaccatgaacatttgttttgtgctatcatatttatataagggaattgtcataaaaaatatcttgttcatacagttttatatagaaaaaagaaatgaatcttttctttatataagtatattttgtaaattgcctctatatttatagtttaaataatagtggttttaaaaatctgacaacaaaaataaaactttcaaaaaattaaatctaaaaagaataggagataaatatgagtattgaagatttatatgattttgaatgtgttcctttgaacaatgagattgatattgatgttttatttgaaaagatgatagaagatggaaaagaaaaagaatatacaccaattatagtcattgatgaaaaagtagggctattaagaaaaaatatagatatgattactaaagagtatggttctcttgaaaactatagagagtattgtttaacaaaatataatgaaattgatgtaaatcaattttttgattttaggaagagtgagatttcagaattattaaaggagctaattgatttagaagatgatttttatgattataaacattttagaccaattataaatatagatatatttcatgaatataacaaagtttacatagctaaaattccaacaattaaaccatatgaagtatttgcatacatacctattggaggatttaatgattgtcctagagatgaagaacatatagctattgcaaaatattggtatgaaaagcatggaatctttccaatcgcaattggatgtgatacagttcaatattctgtaaaaaatttaactaaagatggtaaaaaatttgatgacttatgtattgaattagtattttattgtgaggatattattatacaagggtatgaaaccttaaaggctcttaaggatgtattaaaacgctctacaatagtgcttttttggtgggattgatattctatcatttagatagtattaaattgttagtcaccaagaatccacttactttagttatggggagtgtgtcaaactaggtttttatacacagtgtagcatagtaatatgtttaaattacaaaggttaaaaaaatactttaatatttttaatattataattaatagatttaaaggtaattataatttataaaataaatactttatatgttataatcattaagaatgtaaaaaaataatatatagttttatagttcatatttttccagatatggaggtaaattttgtgaaggaaaaagaaaaattagataaattaaaaaaaatgttacttgaattaggcagtgttgtagttgcttattctggtggagtagatagtaattttttgcttaaggtcgcaaaagatacattaggtgaaaatgttatagctgtgaccattcatgcaatgatgcattcaagtagggaaattgaagaggctaaacaatatactcaaaattttggcgttaaacatatcatattaaatatagaaaactttgatttaaaagaatttaaagaaaatggtgttgatagatgttatcattgtaaaaaatatatattctctaaaataaaagaggtagcaaaagaacataatataaagtacatagtagatgggacaaatatggatgatttaggagactatagacctgggcttaaggcattgagtgaattaggagtgattagtccattaaaagatagtagtttaaaaaaagaagaaattaggtcgctttcaaaaatattaggattaaatacttttaataaaccatcatttgcatgtcttgcaagtaggattccttatggagttgagataacagatgaaaatttaagaatagtagaaaagagtgaagaatatctattcaatttaggtttttctcaatttagagtgagaatgcatggagagatagctagaatagaagttgggcaggaagaactaggtaaattttttgaaaataacaattttaataaagttgatactaaattaaaaatatttggctttaaatatgttacactagatatgtcaggatataaaatgggaagtatgaatttaaatgtgtagattattttaaaaataaataagttttatagttaatataaggaaacaggaggttttatgaaaaattatacattaatatcgccatgtttttttggaatggaaaaaatgctggctagagagattactaatttaggatatgaaataataaaaacagaagatggaagaataacatataaaactgatgagtttggaatagcaaagtcaaacatgtggttgagatgtgctgaaagagtacatcttaaaattgctgaatttgaggcaaaaagctttgatgaattatttgaaaatacaaaaagaataaactggtctagatatataccttatggagctcaatttcctatatcaaaagcttcctctataaaatcaaaattatacagtacaccagatgtacaagccatagtaaaaaaggctatagtagaaagcttaaagaaaagttatttagaggatggtttgcttaaagaagataaggagaaataccctatttttgtatttatacacaaagataaagtaaccatttctatagatacaacaggagatgctttgcataagagaggatatagagaaaaggcaaataaagctccaataagagagactttagctgctgggcttatttatttaactccctggaaagcaggtagagttttagtagaccctatgtgtggttctggtactatattgattgaagctgctatgattggtataaatatggcacctggcttaaatagagagtttatatcagaaaagtggagaactcttgataagaaaatatggtgggatgtaagaaaagatgcttttaataagatagataatgaatctaaatttaagatttatggatatgatatagatgaagaatctatagatatagctagagaaaatgctgaaatagcaggtgtagatgaatatatagagtttaatgtaggagatgcaactcaatttaaaagtgaagatgagtttggatttataatcactaatcctccttacggagaaagattagaagataaagacagtgttaaacagttgtataaggagcttggttatgcatttagaaaattaaaaaattggtcgtattatttgataacttcttatgaagactttgaatatgagtttgggcaaaaagcagacaaaaaaagaaaattgtataatggtatgttaaaaactaactttttccaatatccgggtcctaagcctcctagaaataataaataagttttacatgatttatttgtaaaatataaaattttattaaaataagtaaaacattatgatgccttgaaacgtctaattattgtgaggagatttttgtgaacaaatttaaagatttataggattaggaggagttaaatgaaagtgttaaagcttattactgtagtagccctgatgatgttatttgttactggatgtaatataaaaactgaatctccagaacaattagcgaagatacctgactatgatgatacaaaaaaagtattgtatgatggtattgaccagttactaaaaccagattcatctatgatattgccttctaatacaaaagaagtaggaaaaataaataaggtagatttaaacagcgatggaattgatgaattagtagtatttgaacaaaaagaagatttaagtaataatgtgagtcaggtagggtttgtaaccttgagttacaatggagaaaaatacgtacttggagaccattttttagaaaatggcgaatcaatagaatatgctaatttttatgatttggactcagatggatataaggaagttatcttattggttaaatccaaagacaaaacgaatatgcatatatataaagtagtagataatgaaataacaaaaatatatgacttggatgcatcatggcttcaaaataaagaagattttaatgacatgaaagtaaaaattggatatatagatggagatgacaagttagacatattgatgcttcatttgaataataagactaatgaaatgtttgcaagtgttgcaaattttgatgggaaaatgaaaatcaaagattctgttaagtttgaaaatgtaaaaaacttaagtgaattatatacaacattaggtaatgttgcttcatctgttggaaattcttctgcagctataaaaggtattgtacttgatattcctatattgaaagataataactatattacgcagatactttatatgaaagatgggaaaattaacaaagcttttagtgattatgataaaactattactaaatcttattatatacctgtagatgatattgacaaagataagattatagaaatacctatagttgcaggcagtacaggtaataataaaaatacttatagttctaaatcatctgcaactataagttggtatagatggaatggaaaagaaggtgctgactcaagtttaatatttacaagtcagatatattataattataaatataattttaaattatttattccaaataatttatttgataaaatacttgttgaacaggaatttgttggagaaaaagcagtatttaaattttactattttgactattcagatcgtaagaatttatttaatatagtagtagagagtaaaaacaaacttgaagatagaaaaaatacaggtactcaaaactctattgtacttcaagagagcgatgaatatactttcttactagttgtaaacaatgcaaatgaaatggataagctagatatgactatagacgcattaaaagaatatttctcattaatatatggttaatattatactcaattggaggttttattttatgaaggaaaagatacttatactagaagatgaaattggtattagaagttttgttagtataaacttaaaaagagaaggctatgaaatagttgaggcaggtactggaagagaagctatagaaaaaatgacaacagaaaatgatattacaatagctcttttagatgtgatgcttccagatataagtggtatagaagtatgtaaatttataagggagaattttgaccaagtaggtataataatgcttactgctaaagctcaagaggatgataaaatagaaggatttatttcaggagcagatgattacatcataaaaccatttagtataaaagagcttttagtcagggtttctgctcttcttagaagagtagcaaaggatgattcaagtgttaagtcgagtgaaatagtttctccaccatttatacttgatatagacaagagaaaattatttaaaaatggaaaggaaattgagcttacaccaactgaattttcaatagtgaaatatctaatatcaaatgctaagcaatcgttaagtagagaccagatattagacgaagtatggggaactaactatttatatgattttaaaatagtagatgtaaatataagaaggataagaaataaaatagaagatgacccatcaaagccaaaatatatacaaactatttggggttatggatactgttttagaaaggaagaataatagtgttacattttgaaggtctgagaaaaaaagtaataaaaaactattttataataattattataatggttactctgtttgaaggattgttcatgttttacatacaaaactactattatgattctgtcaaacaactacttgaatctgaaataaaatatgctgatgaatataatgctattacaatggaaactacaagttttgagaaaaaagtaaaaaatatatttgataaacaaccattaactaaaaattcagaatttggaatttcaataatagataaagataaaaatattatattagaccaatatggttttaaaagtaaagaaaaagcaaactatgaagatgttaacaatgcattaaaagatataaaaactaaaaatttaacaccttatacttatagaataccagatacaggggagcatgttatgagtatctccttaccacttaaggtaaataatataatagaaggtgttgttagatatacagtatcattagatgctattgataatgcaatattaaagcaagctacatggcttatattagcaggaatatttatacttattatagctatactaataagtcttaaatttgctgagactcttataaaaccattacgagagctaaagaaatttgcaaatgaattggctgtaggaaattataatataaaattagaaaagatgaagattgtagatgatgagattggtgatttagcacagacatttgaacacatggcacatgagattgacaaaagtgaaaaattaaaagaggaatttatatcatctgtatctcatgaactaaggactcctcttacatctataaaggggtggagtgaaaccttaggttatgaaagtataacaagagaagaactagacttaggtttaggcattatacaagatgaaacagaaagacttataaaactagttgaagaattattagacttttcaaggctttcttcagacaggataaaacttcatgttgatatagttgatgttgaaggtttaattgtaggtgttgtaaatcaacttaaagttaaagcagctgaaaaagatatatcacttttatttgaatttgaaaatgaatttatagagaacattcaaggagataaaaatagattaagacaggttctcataaatttaatacaaaattcatttaaatttacgagtcaaggtggttacataaaagttgtagcttctcaagatgaagagataacaaccatatcagtagaggataatggttcaggtatagaaaagcaaaatttaaataaagtgttagataaatttttccaagaagattataataaggctggtagtggattaggattagcaattagtaatgaaattgtaaaacttcatggtggaagaatgaaaatagaaagtgaaaagaatgttggaacaaaaataacttttaatataaaaaataaatttgctaaacaagcataaattcttagaaagaggattaagatgagaaacataaaaatgatagtagcatacgatggttcaagatataaaggatatcaaaaattaggtgacaataatatgactattcaagaaaaacttgaaaatgttttaagtaaaatgactaatgaaacagtggagataatagggtctggaagaactgatatgggagctcatgcaagaggacaagtggtaaattttagaactaattgtatggattctttggataaaattcaaaaatatttatatgaatatttaccagaagatatagttgtaaaaactgttgaagaagttgatgaaagatttcattcaagatacaatgtaaaatcaaagacttatatgtataaaattgacaataataagtatcacaatccttttataagaaaatatgctactcatgtaagtaaaaaattagatttagatagaatgagaaaagcaagtgagtatttagtaggagaacatgattttactagttttgcttcttctaaatctaagaaaaaatcaaatgtaagagaaatttattctataaatataaaagaagatgataatgttatagaaatatatgtagaaggaaatggatttttgtacaacatggtaaggataatagtaggtgctttgatagatgttggtctaaaaagaagagctccacaagatattaagtatatgcttgaatcaaaagatagatgtcaatcatcagatactgcaccagctaaaggactatgtctttggaaagtaacatattagtcaattatataaaactctctttaaaataaaaataaaataaattatatagttgacataaatggaaaaataaactattatatattttataagagagatataaaactttatatttaaatcctgtgagaaagagagtaacttctatgtgttttatagagagctgaggatggtggaagctcagcaaataagtattagtgaaaagaactttggaggatactaattgaatttagtatgttagtaggtaatctcgccttaagagaaagagtggataagtttatcttatcaattagagtggtaacgcggatatatttcgtctcttggtttttccaagaggcgttttttaatatatttaattattagtgtttatctggtatgttgaacatttactaattgattagctaagtttatcaataagagtggtaccgcggatatttcgcctcttagtattttaaaatactaaggggtttttttagtattaaaatgattttatgtgagtctaaattctcagagtcattcaatattaagaatttctataaaataaaaattataatttaagattgggaggaattaaaaatgaaggaaaaagtagtattagcatattcaggaggacttgacacatcaatcataataccttggttaaaggaaaattatgaagatatagatgttatagctgtttgtggaaatgtaggtcaggaagataaaatggaagatgtatatgaaaaagctttacaaagtggagcatcaaaggcatatgtggatgatataagtgaagaatttgtaactgaaactatatttaaagccgtaaaagcagaggctaaatatgaaggaaaatacttattaggaacttctttagcaagacctataatagctaaaaaattagttgaagttgctcataaagaaggtgcaaaatatatatgccatggatgtacaggaaaaggtaatgaccaagttagatttgaagctacaattgcagctcttgacccgactataaaagttattgcaccttggagaatttgggatataaaatcaagagaagatgctatagactatgctgaaaaacataatataaaggtaacagcaactaaagctaaaatatattcagtagatgctaacctttggcatgtttcaacagaaggtggagatatagagcacctagaaaatgaacataaaaaagatgtttataaacaatgtgtagacccagaagatgcatgtgatgtagctgaatatgtagaagtttactttgaaaaaggtgtacctaaaaaagtaaatggcgaagaattatctccagttgcactgattcataagttaaatgagttgggttgtaaacatggaattggtgttatagatatagttgagaatagacttgttggtatgaaatcaagaggtatatatgagactccaggaggaacaatcctttatgaagcacataatattttagaaagtgctactttagacaaagatacattacatttcaaacaaatggtatcttataaatacggagaacttatttacaatggactatggtattgtaaattaagagaatctatagatgcatttatggaacaaactcaagataatgttacaggaacagtaaaagttaaactttacaaaggaaatataaaacctgctggaatatttactgaaaatgctctttatgatgaaggaatatcttcttttggaaatagtgaactttatgaccacaaagatgcagaaggatttattaatttattcactttaccattaaaaatcagagctatgaaagctggaaaataataaaataaattatttaagagtgtataaaaactatttttaggtttttatatgctctttttttatttgaatttattaaattatacagtaaatagtataaaaaaatatattatagttccaaatgacttaataatgtgaaaatataagacctaaaatataaattttataaatacaatagttattgactctctcattgtaagagggtttatactgaatctaatgaaaatttatagtgaggagatagattatatgagaaaaataattgaaattaaacatcattcacatgattatgagtgtatgtggaatggtatagaagatttatatataaataaaaccggtgaatgccttccaaacgattttttctttttactgtcaggttttggttcattttgttatatgaaaacaaataaagctgatttgaaaagaatggtagctttgggagatggaaggacaaaacagatgtataaatttttagcaccaattgttggatttgaatacaaacatcatgagtttaaaaagtatgagcaagcattaaagaaagcaaaatctgaaattgatggtggatatccagttattttaggagctttagatatgtattatctaccatattataagaagctatatcataaagaacacattccttttcattatatattaatggtaggatatgatgatgaaagaatatatctgtatgattgtggtagaacagaattattacatctttcttatgataaattacgtgaaagcatgaattgcaattcccctggattaagcaaagaaaatactatttgcacaataagaatgaatacttcaaagaataaatataacattgctagagaagctattgctataaagcgtgatatgtttttaaatccatctaaaggatttttgggatataaaggttttgaaaagtttattaaagagttgccacagtggaacactgaattggataaagatgattatgataagattttgaccaatatggttatgttttttggaacagtaccaacaattccaaatgcaatcaaaggaattaaagaaccagatactgttcaatttaaaggtggatttgataaaatgagtagaatgctcaacagtattggggaggaatacaaaaacgactcttttatacaagtagctgatatttttgataaaactgctattataattgagaaaatatccaatattataatagattatttaactcaaacatgtgatgatacagaacaacttccgttattgttctctgaggtcttagagcatatgaaaacaggatatttaatcttggatgtataaaaaatatattgttgaccctaacattacgtaatagtgtaatatgaaaatatagcttgaatatattagtaggtattgatggctgtaaaattaaaatttgaggtgtggatatgagaacagtgaaacaagtttctgatttaactggaataagtgtgagggcattacattattatgatgagataggtcttttaaaaccaaataaaattacagatgcaggatatagactttatgatgatgaatctattaaaactcttcaacaaattttattttttaaggagattgatattcctttaagagaggttaaggaaataatgtcaagccaatattttgataaggttgaagctctaaaaaatcaaaaaaaattacttattttaaaacgaaagagactggatgaattgatagagcttataaatcaaactctaagaggagaaggaaatattgattttaaagagtttgatatgagcgagtattttaatgttttagaagaatttaaaagagaacataggaataagataattaaaatttatggtagtgtagaaaaatacaatgaatatatagaaagagttaagtctaatgaagagaaaattgctaaaatggctataaaacaatatggaactattgagaagtttgcccaagctataaaaacaaattttagcagtgatatattgaatttaggagaaaaatttgatagatataaaaatgattgtttaaaagaaaaacatccaaaattaaaagaattatatagaaagcttgtagaagatttaagtaagaatccttcttcaacagaccttcaagaaatagcaaaagagataacagatatatctaaaaaagattatgaaattttctctatgtatactggtgatgacaactggtattatatgattcaaaattatctagtaaatcctatgtggatagaagaagtagataaaaagtatggaagtggagcaggcaagtttattggacaagtactaaagacttatctaagagatagaaaaccaaagataaatacattgtatgaaaaacttgtagaagatttgagtagagattgttcttcaagggaagttcaaagcattgttgaagaaatagacaatgaaatgaaaagaagtaatgaattttataaaatagacaatggtgaaagatactttgattatatgtcagagctttatttacaagattctaactatataaaagtaactgataagaattatggtgatggtgcatctaagtttattggagaagcttttaagatttattttgataataataattgttgaaaatttggaagtaaaaaatatgtaagttttataaaagcacaaaaataaggatgtagattagctccatctatatccttatttaaagttattaaaatatatagtttacatcaaacttaacactttcaataatatttcccaaatatgtttttatactttcaacttcttctaaagattttaatttattttcagtataaattgctttgtccagaatattaaaccttaatcctatttcatcaaagtactcatgatttaaaactttgtaccaatggtttttttctttattccaactcgtagatattgaatcagcttctttttgagctttttcccaatcttcattttctatagatttttctaaaacagatatattgtctttatatccttctgtaaaatcatatagtttattgttaacgtaaaatccaaataatacaaataagatagtccatagtataacaaatgttgtagatttcaatattaatcaccctttttattttgaataaatattttgtcattttcatctaaaacacaaataagaacatctttaaaagtttctatgtgattagattttaaaatacccattaaccagttagtatctttttgagctatgtctagatttttatttattattctaccatccagtataagtgggataggtaaatgattaaaagctcttggaggagtactattgtagcttgatgctggtacaacacttagattaccatcagtctccaaaatagcatattgtacatcttttaggttgaagtatccttgaatcctaagttgttctaataattcatctatactaattctttcttttttaagctctttatatacaatttttcctttatctattaatacagaaggtttacctgataaaaatgaacttaattttctgctttttaatgataagaatgaaataagagtctgcatgattacaagaccagatattgctgcaacaccatttatgattggtatattattattttccattgggacagatgcaacttctgcaattaatagtgttataactaaatcaaaacagttcatttcagctatttcaccttttcccatgactctaagtgcaattagcactgttatgtataatataatacttcttattaatactactgtcatatctatcaattactcctttaaaaaatatttacacttagttagtatatcctatataaaaaatttaattcaaagtataaaaaaccttaaataattggattcaactatttaaggtttttttgataattttaatattaaattttttatggattttctgttacttttatttattttaataacagattcaacaaaactctttttatctcctaattttaagataaaatcaggatattcttcaaattcattgagttttattaatttgaaagaagaagatagatttttaaagttaatgattttagagttattcactaatacacttctttttttaaaataaatttcttttttacttatatttagtatagttaatatttgtttaagatatattattatatcttctggagttctatcaaatttgagttcaaaattttcatcttcaaagtagggaatataatataaaggtgttttgagagcaggtaatttattatataattcttcaagaatatcgatatttttaggggagttaaagaaaaagcatttacatacgttcattaaatccacagcatctgaaagtgagttatgtttaatatctccttctacagaaaaaatttttttcatattcagtaaagatatttgcttagataagattctattattgtatgtaatatgttgagatataaaaggttgaatgtcaatcatcatattaaataactctaagcatttacctgtatatttatatactctaaatgaagttagaaggccagttatatcaaaatcaccccaattatatattgtaacatcatcaaatttacaaaaccatttataaaaatcatccataacatataaaagattaggagcattattgatatctagttggttcaatttggttaaatttttacatttatttgaaagtattttattgtattttggcttaactaaagagtaataattatctattgtattaaattcgttatcaactaaaactccaccaatagaaattaattccgcaccattatattcttttggtttatttttattatcatctagtatattaaattcaaagtctataaataacttgtatttcataaatctaaagcacatcctcaggtaaattatttattgagcctaagcatcataagaatcaatagatataatgactctaaacatcaaaggttcattacaacttttatttatttcataatttaattcaaataaatcttttaagatataatttataagtattctttcccaacccatttttaaattaactttagagtctattaatatattttctatctttttaaatatttctatatttgctggtattatactgagctcaatattacttttaaacgggttagactgtaaatctgttataagtatattttttaattcctctgtaagttcagaaattaaactatcacctatgtatttttttatgatttcctctctaatttcttttaaatttagcaatattagtacctgctacttacatagtagcttttcctttccttttaatactattattcatttttgaatcttatttagatatattttaagattaaaagtctttagctatataattttttacccatttttaacttatattaacatattacaggcttatatctccaccctgcttacattgaggatggagtatattgcctattttgataaaaatgataggttgttatttgcctattcctttttctgataatttttctaacatatctttggtcattttatctaaatcataactaaacttaaagttccattcttttactgcactactactgtctagagagttaggccaagaatcagctatactttgtcttacagggtctacatcatattctatcacaaaatcaggaatatatttttttatagaatcagctatttcttcaggagaaaagctcatagcagtaatattaaaagcatttctatggatgagtttatccgctggagcttggattaaatccactattgattgaagtgcatcaggcatatacatcatatccatttttgtaccttctgctatgtaagatttatatctcttattttttaatgcctcataatatatatcaactgcataatctgtagttcctccaccaggaggcgtaacataagaaataagacctggaaatctaacacctctagtgtctactccaaattttgagtgataataatcacatagtaattctccagaaactttagtcacaccatatatagtattaggtctttgtaatgtatcttgaggagtcatattttttggagaattttcaccaaaagcagcaattgaactaggtgtaaaaaatttacaatccaattctttggctatttcaaggccatttattaatccattcatatttaagttccaagcttctaggggtttactttcagcaactgcagaaagtaaagatgctagatgaattatagtatctacatcatatttttttgcaatttcaaaaaaacgattcttatctgtaacatctaatatctcaaatataccagattcacatactggattaccttcttttactctccttgaactagcgattacattttgttctccatactcatttctaagctttattgttaattctgaacctatttgtcctaatgcacctgttataagtatttttttcaattttacaacctcctaagggtttaatttatgtagtactacttatttttattttagcaaatcttttgtttaaatacaaagaattaaagataataatatacgacttaattgaatgaagtgcagtaaattcctaaaaatttaaagttgagatataatggtctattgtataacaataaaagactagattaaattattatatagattgtgtgactaagtcacagaaagtatagttaatttaatatataataaaagcatatcaagtaaagctttaaattaaagtaactttatataaaaagtaatataaattgataaaattataaatttatttatagtgaatataggttggattttatagatacaaaaatagtatatatgatatgtagaccattagcatgtttaaagtagcaaaacatataaaataaaatttgaaaggaagtataaaaatgacaagaccatcaatatatcatagccaaggatacacttgtgcagaggcattaataaagtcttataatgaggaacacaacacagatataccaatctcaataggaagtggtatgggggttggaatgaatgttggaagtgtttgtggagctgtaaatgctgctgttgttataatagggtatttaaatgggcgaaatagtaatttagatgaaaatatagcaaggaagtattcaagagagctattgaataaagtaagaaataaatacagctcagaaatatgtgtatctcttaaaaaaaataaagtaacttgtgaagaaataataaatttcacatatgatgctctaaatgatatgctaaaaaatcaaaaataattctaagaaacaagtattttacattcgatagaatacttgtttttttatgatatttttaataggtattagtttattataatttttaaatcaattttattatattttaattgaaataatctactttgaaaattactaactgacaaaagaatatgattatagtatagaaaaaatgtaaattatttaatattaagtgagagtatatgcttacctatataaaatcgtataaattaatggctaaatttataaattataaagaaatatataagaaaacaaaagaattaattagtataatataaagttaaaaagtgaaaatttatataatttatttataaagtaaagaaaaaatagaaatttgtaatgaaataaaaagtttatgacataatatggtataattagtaaaaatatagagattggaggaattgctttgtttatagatgaagaattagaagggtatatattaacatgtaaaatatctgaagactttaaaaatatacctgaatatagtgatgaagagttttatgttacagtctataaagatgaaagttctgactctgggtactatgctttattagaaaataaagaagaaagagttgtatgggatggagaagttgttgccaataatatttttaataacctttggattgtagtaaataaggttaaaactggataatagtctaattatatagtatttgtaatattttaaatgaatttttacatatttgagatgagtaaataacaaagattattcgatactggaggagtaattcaatggaatatagttatagtaagatgaacttaaaaaaaggggatattgtagaggtaaatttagagaaacaagccaatgtaatattgttagaccatataaattatgtgaaatttaaaaatcaaagaaattatgattactatggtggatttgcaaagaaaaatccatgtagaatgagagttcctaatactggaacatggtatctagtagtaaatcaagatggaaatagtggaatagtaaacttttcaatcaatacaattcaaaattaattttagaatattggatattcttactttttgtactttttatatagttaaaataaaattaataagcaattattataaaataatgtgggtgcctcaaaatgaattttataattcacgagacactcttttttgtataaactcaaatatactttatcatttcaacaatgaaaaagaggcgtatctgtgttttgagatagcctcatttatcatatatcatatatagaattttaattattcttaactaaaattttttccataggttatctgtacaattaaaatatttattgttagcatacagctccacctgtaaggtgtaaaagagcctctagtatctcttcttttctttccaaaacttcatctgataaaagcatttctataaatttatcagcaccaattctatcgatagttattccaaaacgttcacctgtgttaccctgttctctaaataaaagaattgctttttcaattaaagtcataagttcctcttttgaaaataatctatcaatctgtgttccaggacgaactgattttccccatttccctcctatatagactttataaccagattctttttcttcaatactatcaaaattacaactttctatacacttaccacagttattacatagattactgtctatttcaagtttacctttatctgttaatttagctgctttaacaggacagacctctacaacagcacattttttacaaccaacacaaagctctgaatcatagtcaggtacacgttgaccaacaattccaagatcgtttaggtcaggtttaatacagttattagggcatccaccaacaccaattttgaacttatgaggtagttttacatcataccaatttttgtaaaattcttcgtgtatttcagtagcaagtgcctgtgtatcagctagaccatgaacacaaacagtacctttacaagccacaacaggacgaacccttgatccagttccacctgttattagattttcgctagcaataaattcacttagagcttcaatatcttcaaattttacaccaggtaattctactgttagtctagtagtaaatgctaactgaccgtttccgaatttttcagcagcttctgcaattttttttgcttgtgatgcatttattacaccatttacagttattatacgtgctgcaaaatgttctccatccctgcttggtagaaaacctctaccttttacttcctttttttgttctgctgtaacattactcatatttactcctccattaccttaagatttggataaaatagtattccaccttcaagaactttcgtatttgtatagccaaagcgtcttaagcgattttgcgccatatagctatttttacctttagcacatataagaagaattttttcatccttagcaagaccttcaatttctccattaatttcaccaacaggaatataacgtaaactaggaatagaaggagcttttgaaacatcaagtttagtccaactgtcaaaatcctcaatttcgtcaagtaaaacactatcaagttctccgttaagtttattttgtaaaacatttactgccactacaaaagggtgaatagctgttgaaaaaggtggtgcatatgcaaggtccatactttctaatgaataaaggtcagcgcctaaagttattgcagtagcagcgatatctactattttatcaaccgctccaggtcccataacttgaacacctaataattttctagtatttttttcagcaaccattcttataataaaattagatgcacctggataataatgagctttatcatcggtagctatggttacagagcaaacattataaccttctttttcagctatttctttacttagacctgtttttcctgcattgagctcaggtaattttactactgtcgttccaagaacaccattgtaagttttagattttccagatatattttgtgcgcaaattctaccctcatgatttgcagatgaccccataggtgaccatgtaggtttatttgttaaagaattttttacaaaagcacagtctccaactacgtatatatctttatcatttgtaagcatatattcatctgcaataattgtattattaggggcaaattctaaacctgtgtcttttagaaaacctgtgttaggacggattccaactgacataaccactaaatctgttttaatagctctatttttagtacgaagtttttcaactttattttcaccttcaatacctacaacctggtcacctgtaaaaatcattatgcctttatcagccatatgattttcaacgtattcagcaaaatcagtatcaaatccaggcataacatgttcagccatatcaacaacacttacacgtatacccattgcagaaagattttcagcaatttcaagaccaatgaaacctccaccaataacaacagctctcttaataccgttttcaatagaatctcttagttttatagcatcatttggagtacgcataaagaatactccaggtaaatctattccaggtattggtggttttattgggtctgcccctgtagcaattacaagtttgtcatagcttagattttctttttctcctgttgaaagcgttttcaaagttacttgttttgcatttctatcaatagacgtaacttcaactccacaacgaacttctgctcctgttagtttagaaaaactttcaggtgtatttacgattaaagatgatttatcttcaattatcttaccaacgtaatatggaagaccacaacctgcataagaaatatcatcacctttatttagtattgtaacagagcaattatcacccatttcacgttttatttttgcagcagtttttgttccagcagcaactccacctataattaatactttcacaatatatcacactccaatctactttataactctataataaaattatacttcttgacaatatatttgtaaaatactaaaatattaataaaatcataagcatttactaatgtttgctaaggttgtgataatatgacaattcgtagtcttgaaatctttgttaaggttgctgaatgtggtaaaatgagtgaagtagcaagaaatatgtatattacccagtcatcagttagccaagctatttcagaaatagaaaaagagtatggtgttaagttatttgatagaatttcaaaaaaattatatttaactgaggcagggaaaaaacttcttggatatgggaggcatcttttagctgtaaatgaagaaatgaatgattgtatgaagcattgtgcaaaaaatatccgtataagagttggggcaacagtaactgttggtacatgtgtaataagcccgataatgttagaattatacaaggtaaatcctcttatagaacctgaagtatttgtagaagatacaagactgattgcaaaaaaattacttaatagtgaattagatattgcgattgtagaaggaaaaattaagcacccagatattgttacaaaaagcattattaatgataatcttgtacttatatgttcacacaagcatgagttctacaaaagagactctataaaagtttcagaactttcaaatcaaccattaattatgcgtgaattaggaagtggtacaagagcacaattagaaaagcaattaaaagaattaaaaatcccaatgaatattagatggtcatgttataactctgaagctatattaagagcagttgtagataattttggcattgcagttatatccgaattacttattgaggattatttaaaaaagcatcttttgtgggcttgtgatattgaaggtattaacttacatagaacattcgatattgcatatcatagaagcaagttttttacagaaaatatttcagcattttttgatatttcagtagaatatgggaaaaaacaagcgagaaagaagagtagaagtgtaaacagtttataatatatctaaataaaaataagagtatatcaatatactcttatttttatttagatatattagcctatattaacgccaaaatttttacacaatcctgcaagtccatcctcaaatccagaacctaaagcattaaatttccactctccattatgtctatatagttctgccacgactattgctgtttctatgctaaaatcttcacccaattcatatttaataagttcctcgttagtttcttcattatatattcttatatatgaattttcaacttgtccgaaattttgtcttcttgtaattgcttcatttatagtaacactaaatgatattttagcaatattttgaggtattttagataagtctacatttatttgttcatcatcaccatcaccaacacctgttctattatcacccatatattcaacagctccagaagcgtgttttaaattattatagaatataaagtctccatcattcgttacttttccatcagttccagttaaaaatgcagaggcatctaaatcgaaatcaaatccaccatcatatttattaatatcccatcctagtcctactattactttttttagaccagggttactttttgttaaacttactttttgtccttttgctaaagttatacccatttaaaccaactcctcattataaattttttattgtaattattacttatatgtattaattaattcacgaagctcttcattttgaccaattcctaaagcattaaatttccattcttcatttctacgataaatttctcctgccaaaactgttactttaccagaaaagtcttcttgaagattatatttaaataattcttgcttggaatttgaatcaattaatcttataaaagagttgttcatttgaccaaaatcttggtctctttttttagctttgtatatagaaactccaaaaactattttatgtacatattcaggtatgtcttctaaattaacaattatttgttcatcatcaccttcaccttttccagttaagttatctccagtgtgtataatagctttagaagggtgtttaagatttccaaaataaaccaagtcacctctaacattcattttatcttggttagtcaatgctattgcaaatgcatctaggtcataattttttttacccaatttattcatatcccatcctaagcctactactagattttttacaggattattatcttttactaagctaactctttgtcctttttgtaaactaacactcattttaagttctcctttttatatttttagttttattgatggtatcaagtataagaaccatattagctatattatatacgtatttaggctaagttggctatatttataaattatttattatataactacatgaatattttataatttaaacatattgacattatatgatttaaattattttgtagttttataatatttaaatttgtatttgattgttataaagtaaagtaagtaataaagttagactcaataattctaaaatttctaagcacactatctaaatgagaacgtatttggaaatacttgtataaaacaataattgatacatttaatttttatcttaaaaataacaattataatatataaatagaaagtataatatataaatagcaagtataatataacatataaaaagttgaatttgtatatgttaattatacttgctatttattgttagttattctatttttttaaatccattacctaaagcttcatgtatatctgtaattataataaaagcattagggtcgacattttttactaatttttttaattcgacaacttctttcttttcaactactactaaaagtacatttttattttctccagtatatgcaccttctccttttagaatagttgcacctctatctaaatcttccattatttttttacttatatcttttgaaaggtcagatataatagtgaatgatttggaataattaaatccttcaataagcaagtcactaacttttactaaaatgtataaagccacagttgaataaagtgcaatttcaacctgtctatttactatacctgataaaacaactacaacgcagtctacaatacccattaaaacaggtatactaaatgtaggaaaatatttatttagtaggagtgccattaaatcagttccacctgtagagccatttattctaaaaataagtccttgaccaactcccattaaaatagaaccagatataattgcaagatacatatcatttgttatatctaatgtagccatatttgcagtaagcttaagtgctatggtaagaaaaattattcctaaaaccgttttaaaacaatctttttttgaaagtattttgtaagcaaatatgaataatggaacatttaaaagtaaattgacaatccaaagttctacaccgaataatgaatttaaaacaactccaagtcctgttataccaccagcagcgattgcatgtggattaaaaaataaattaagagaaatggccattaatatacagcctacaattaatattaaaatttctgaaaaagttattctatcttttttcaataacatcactccttatatatagattataatatatattatatagtttttccaatttttaataaaagaaataaaaatatattataaaaacaatttgattggaattttcagaaaattaatgctataattaaaagtaaatttaaagggaggttataaaatggctaaattaactctagaacatataaaaggaaatacatattatattccactccctacaatagtaggtgtatacgtagatggtaaagatgcaattttaattgacagtggaaataataaggatacagctagacaagttttaagattattagaagaacataatttaagtcctaaattaataataaacactcattcaaatgcagaccatataggaggaaatgcatatttgaagaatcaaacaaaatgcaagattgctacgactaaaattgaaggatattttacagaaaatccaatattagaatcagcatttttatatggtggctatccaagtaaagcactgaagaataaatttttattagcaaaggaaagtgaagttgattatattataccttcaaatggcaaaattgtagatacagaacttgaagcgatttctcttccaggtcattattttgaaatgattggtgttagaactccagataatgttttgtttgttgcagatagtcttacaccagagaatataattactaaatatcattttttcttcctactggatatagattcacagtttaagacactagaaaaattgagaatgttagaggctgatttctttgttccaagtcactctgtcaaaactacagatataaaaagtttgattaatattaataagaagaagatggaagaaataatagataatattaaaaaggtttgttatgagccagttatgattgatgaagttattgaaaaaatgtgtgatttgtacaatgtcaagcttgatgctaatcaatatgtgttggttggaagtacaatacgttcttatataacttatttatatgagaataatatggttgaatatatatttgatggtggtaagatgatgataaaagctgtgtaaatagtaataattttcaaattatatgatgaaattgttttagtatgactgttatttgaaaagtaacataaaaaaatttatataaataagctaagatgattgatataaagttactgataattttaaggtaatatatacgttactataatattatgttattatttgtaaataaggggataatttataagcaaattaaagaccttaatttacaggaggaatagtgtatattatgaataaaaaattcaaaaaattcagtaaaaaactaagtatattaattttagttttgactatgtttctttttaataatttaactgcaaatgcacagattaaagaagattcaataataggaattgatagatatgaaacagcaggacttatagcagatagacaaacttatgatactgtaatattagttaatggagataaaaatttatctgatgggctttcatcaagtggattagctggagctattaacgcaccaatacttttgactaaaaaaagtgaaataccaaaagctactttaaatagactagataataagagtttaaatgttgtaaaaaaagtatatataattggtggttataatactattgaaaattcagtagaaaaagatataaaaagaaaaggtattcaagtggaaagaataaatggtaacaatagaattgaaactagttataatgtagctaaaaaaataaatgaagtaagtagtgtaaaagaggtaatgcttacaaatggatttgtaggagaggctgatgctatgagtatagcacctgtagttgcaaaaaataaaggagctataatacttacagatgggaaatcagttccatttaagactgaaggtttaaatgtttacgctataggtggcaaatctgcgataaatgaggatttagtaaatgaaactaaagcaactagaatcggaggaaatgatagatttgagaccaataaaaaggtaatggaaaagttttataatggagcgacagatttttatataacaaatggatatcaattagtagatgcactaacattatctcctttagccaaagaaaaaccaatcgttttagttgctgatggaagtaataaaggtattttaaaaggagctaaaagtataacaaaagttggaggtattgatgccaatatatataaacagtgtttagatatgattaaatataataatatggatgtgactccaaatattttaaaacacttaacttcagttgaaggaaatgaagtttctgaaatacttatagaatcagataatttaggtgtggttgttgaaaagacgaataccaataaatttgagtttgattacgtaagtgtaactaatgaaaaaaattgtactttttctgtatataaagaaaattcttctaataatgtaaaaaatggaaagctagttgtaagtgctaagaaaaaaatagataagaaagatagtgatttgcaagatatgaatggcgacaatatgataaatgcaaataaagataggatggtaaatgtgataaaaattggagttcccgataaaatgtattctaattttaaagtagatgttgaaagtggttcagtagaactttataatattaaaggaggagctactgttgatgtcaatgacggaattgctaacattgttgataacaatgtgacaaatcctttcaatataaatactaatagtgggatttcaggtgtaacagctgaaactatatcatctgagataaaatttagagcaaacaatggaattgtaagtgtaacagctacaaatataaatggcaatataagtttatttggaagcgataataaaggtacctttgatggaatatttaaattaaatctgaaaaaagaaccatcaaatttacacttgaagttagttggaaatgggataaataaattgccagaaggttggtctaaagattatattttaggaaatggacaaccaattattgaagttaaaaataatggcataaataatatatcaattggagaataaaaacatatgaaaataaagtttatatagttttaaaaattatagaattttaaaatatttatatatattctttaaataaaaaattattttttaagtgataattaagtatttatcgataaggctatggttgtaaaaatcatagccttatttttatattataaataaattagagtatttatcaattcatagtagataaaattgaaattaaatataacaacaaaaaatgaaaattacaattaatttaatgttaaagactcaattatttggatgtggaatggatagtacaagtagtatataaaaagtattgactggacaaataactatattttattttaaatatataatataatgtaataaaatatatcaaatgtagaaggtgataacctatgaaaaaaataacaataaatgatattgctaacttggcaggagtatctaaaagtactgtatcaagatatctaaataataaagatatcagtgattctactaaagagaaaataaagacaataatagatgaatatggatatgagccgaatgcatttgctcaaagtttgagagctaaaaaaacatactttattggtattataacaccgtgtttagattcttttgtaaaatctaaaattatgatggcaatagatgaagaactcaaagaattaaaatatacatcactaattattaatactaatagaaaaataaggtcagaaatagatagtatatcaaagttagctagtctaaaagttgatggaataatactaattggtaccgaaataactaaagaacataagaatgaaattgaaaagttagatataccaatggttgtagttggacaaaaagttgatggtatcaatagcatagtgaatgatgattatggagcaggatataaaatgggtcaatatattgctaataaaggttacaaaaacattgtatatttaggtgttgatgaaagtgatatatcagttggtttaaatagaaaaaatggagtacttaatgggttaaaagataaagggtatgatgcaaaagtattttatactgactttgaccaagaaacgtctatacaaagaagtggagaaatgctagaaagtgaaaatccagatataataatatgtgcaactgataatatagcaatagcaacaatgaaagaaatcaataagagaggtaaaaatataccacaagatatatctgtagctggatttgggggatatgatgtattgtctattataagccctaaacttacaacaataaagtttgaaaataaaaatgcaggtaaagtagcagcaaatacgatagtgaacttaatacaagaaagaaaagaaccactattaaaggagattaaatttgaattaatagaaggtgaaagtacaataaataaaaattaagatacacattacatatattagtaatgtgtatttttttactaaaaaaactataattctaaaaattaggaaaacttttttgaaagaaatattgcatctgaaataaatttatgctaatctttaattaaaccggtttcgaaaccggtttaattaaaccgaaagaatagcacaatgagtgcaaaaataactgattgtaacaaagtatcaaagtaattattagagtacataggaaataaacaaaatataaaaggtgtagcacattgtgtaacaagattaagaattgttttagatagtaataataaagcaaatataaaattacaaaagaaaaggaataaaaatatgtacaaagagcctaaatatagaaccatattagaatcgataaaagaagaattaaataaattaagaaatatatctttaaatgataaatataaaccactatttcatatacatccacaacatggactacttaatgatccaaatggattagcatattataatggtaagtaccatgtattttatcaatggtatccatatgatgcaactcatggaatgaagcattgggcttatgtaagttctgatgattttgtaaactggaatagagaagatgtagcattaataccaatcgaaagttatgaatctcatggagcatattcaggtaatgcgatagaggtagatggaaaattgcatatgtattatacagggaatataaaatatagtgcagaagatagatatgcatatcaaaacttagctataatgaacaaggatggtaaaataactaaatatgaaaataatccaatagtaagtgaaataccaaaaggatatacaggacatgtaagagacccaaaagtatttaaaagaaaggataaatactttatgttacttggagcacaaacaagtgataaaaaaggagttataatagtatatgaatctaaaaactctatagattggaattttaaaggagaattaaatgtaaaaaatatagatgaagattttggttacatgtgggaatgtccagattatattaatatagatgaaaaagatatattaatattttcgccacaaggagtagaacctaaaggatttgattatcaaaatatatataatgtagtatatgctattggtaatatggatttagataatttaacatttgaaatagatacaatgaaagaactggaaaaaggatttgatttctatgctccacaaacatttataaaggactcacaaataatactatttgcatgggctggaatgggagaagttttataccctacagataaaaacaaatgggcacattgtctaactgttccaagaaaattaaatataaaaaataacaagctattgcaaatgcctgtagatgaattaattaaattaagatatgatgaaacaagtgggcaaaatactataaagaataatatcaatattatagaaaatgatgaaaatgtatatgagcttaatattaatataaaaaatattgacagcaataaatttgggctggaattattttcatcacaagatgaaggtgtaaaattagaatttaacaaattaggaaacattgtaactttagacagaagcaactttaaaaaagttttcggtgttgaatatggaacaaatagaaaagaatatataaatattgatgaaaatactaatatcaaagtactagcggatagaagtgttttagaaatttttataaatgatggagaagtagtatttactagtagaatatttgctaaagaaaattctaatcaaataagggtttatagtgataaaatagtagagtatgagtatactaaatttaaattaaagcaaggtattgaattataaaaacacattataaggggtagaaaagatgaaaaaagtaattagtataggagaagctttaatagactttatacctaatcaaaatggttgtaaattaaaaaatgtatcagaatttagaagagtagcaggaggagctccagcaaatgttagtgttgttgtagcaaagcttggaggaaaatcaagttttatatctaagttaggaaaagatgcatttggtgattatataatagatgtattaaatgaagtaaatgtaaatactgattatgtattgagaacaagtaaagcaaatacaggacttgcttttgtatcattaaaagaagatggtaatcgtgatttctcattttatagaaatccaagtgcagatatgcttttagaagctgatgaggttaaaaaagagtggtttaataattgtcatatcttacatttttgttcagtagatttaatagatagtccaatgaaattagcacataaaaaagcaatagaatacgcacttgaaagtaatagtataataagttttgaccctaatataagattacctttatgggatagtgagcaatcttgtaaaaaggcaatatcagaatttttaccttttgctcatattgttaagatatctgatgaagaattagaatttatgacaggagaaaatgatatagaaaaatcattacataaactctttgtggggaatgttgaactagtattatatacaaaaggaaaagatggagtagatgcatacactaaaaaagtaaaaggtatgtgtaaaggggttaaagtaaatgcaatagatacaaccggagcaggagattcttatataggttcatttttatacaccttattgtataaacaaataacattgaatgatataaaagaaatgaaacaagaaacgttaaatgagtatttagaattttctaattattatgcagctcgtagtacaactattaaaggtgcgataagttcatatgcaacaaaggaagagataactgaatttataaaaaatttatagtaggaatgagtaataggttttgaaggaagtaacatgtaaagagtttttaaggatgtttactatgaaaataattaacatataaaaagcaataaagaggctgtctcaaaatagatataagcctctttatcattgttgaaatgataaaaaatattttaattattgttactttttagaagaatatatatcttattttaaataagcaaattatgtaagatttatttatattatcaatactttacttggagtattatgtctttagcagttatctacttcaattgaattatctaaaatataataaatttgttttgcaaattgacgagaatgtttttctttttctttattcataaaattaggtttacctaaatcacgttcaacaagcattcctatatattttaactgtgaatgcttacagtagcgcttcataccattttcccaaatatcagcacccttttcaggtctatatccacatgttgtaataagtgctactggttttcctgcccatagagcggggcctttctcattaccatagtacttattcattccatacaccaatctgtcaagtagtgctttcattggagaagtgcagtaccaagaataaattggagtagcaaaaacaattaaatcacacataagaattttcttgaaaattttctgaacatcatctttacaataacatccaaaatcaaataagttatcctgacattttttacaagcaatacatggctctattttacaatcatataaccatattacttcaatatttgaattataattttctaattcctcaataaaaggttttaaaatagcagcagtattaccttttttcttaggacttcccataagaatgcatatttccatattgatacctccacagtattttaaaatagtttttagtgcttaatatagttttaggatactatgagaatacgttaacaacaatacactttgtatatttttaataaaattgaaacaaattgttttatcaataaaagttggaatgtatctataattaaaaatattttaggtatgtttttacatatatgtgtgtagttaactatggtaatttattgtaaaattatcttataggattataattgcttaatttatgattatatttaaaatcttggaggtaaaaaatatgtactcaaatgaagactataaatttatagaagaaaatgcaccatgttatatatatgatgagactaatataattgaaaaatgtaaggaattgaaaaataatattttaggttttgattttttatattctataaaaacaaatccatataacaaaattgtaaaaagcattgcagagcaaggttttggagcagatgcttcttcaactaatgaagttatgatttcatcagaatgtggagtttctaaatatgatatttattattcatcaccaggcaaaacagagattgatatagaaactgttttagataaatgcataattattgcagatagtattacagaaatagaacttataaataagatatctaaaaagcataatcagaaagttaaaataggaataagaataaatcctgattttactatggatgatgatagtgctaaatcaagcaaatttggtatagatatagaagatatgagcagtgtttttaagatgttaagtatgtgtgattatgtatctgtagttgggattcatatacatattaaatctcaggtattggattttgaaaagttaggacattattatgaaaaatgtttttttatagctttaaatttaaataaaagtaagtatattaatattgaatttataaattttggtagtggacttggagtagcttatgataatcttagagaaaatccacttaatcttaaagagctttcaaaattaactcaaaagattgtttttactaattcaaacacactgaaatcaagacttcttattgaatcaggacgtttcatagtttgtaaatcaggtaattattatgttaaaattgtagatattaaagtatcaagagggaaaaaatatcttattgtaaaaaatggacttaatggatttatgagacctattatttctaatttaattgaaaatattacttgtggagtagaattagaaggtcaagagccattatatacatcaaatcatgccttttctctttcagtattaaataatttaaaagaagaagagtatgtaaatgttgttgggaatctctgtacatcattagatgtaattgcaaataatgttaaattgaaaaaagcaaatataggagatttgatttcaattagtaatgctggaagttactcctattctttatcaccactattattttcgagttatgaatttcctaaacaatattataaaagaaaagatggatatattgagtaaacaataggataaattaataaacttagtattattgaaaaaatttaaaatgcagggggtgtaattctatatggaattgtggaaaagaaatttatttgtatgttggataggtatgttttttagttctatagggatgagccaaatagcacctatacttccattatatattaaacagttgggggtaactgatgttagtttaatacaacagtattcaggtataatttttggatgtacctttgtagtagcagcattcttttcgccaatttgagggaaagctgctgataaatatggaagaaaatcaatgcttttacgtgcaagtattgggatgggaatagttatatttaccatggcgtttgttcaaaatgtttatcagttattaggattaagaatacttcaaggagtttttacgggttatgctactgcatgtactactcttattgcaacacagacagataaaaatcattcaggatgggctttgggtactcttgcaactgcatcaactactggctcattaattggtccaacagtaggaggatatatagaatcaatcttgggtcttaaaagtacatttattataacaggaggattgttgtttgtatcatttatcatctctattttatttgtagtagataattttaaacctaaagaaataaaagaatcaatttctatacctaaagaacaattaaatatattgccaaataaatttttaattgcatctatttttgtaaccacattcattactcaactagctttatactctatagaaccaattgtaaccatatatatatcacaacttacaaattttgcatcaaatgtagctttaatagctggattgacattttctgcatcaggattagcaaatttattagcagctcaaaaacttggaaaaatgtcagataaaataggtcctcaaaaagtattgttaatttcacttttatgggctgggattatatttataccacaagcttttgtaaaaactgcatggcaactgatgttgttgagatttttattagggttgtcagttgcagggcttaatccttctgttaacagcttgcttaaaaaaattgcaccagaagaatatgtgggaaaaatatttggatataatgcatctgcccagtatataggttgttcatcaggagcatttttagggggacaaatatcagcacatttaggtattagaacagtatttttttcaacaagtttattgttgtttatgaatgcactttggatgtataaatttactggattgtttattaaagataagactaaataatcatactatttacatttctaattttatgatgtaaaataaatattttttatgtaatttatcatagaattatataaaaaataactctatggtaaaaattggaaaatattattatcgacaaaatctttgacttaaaaactatattgcgatagtattaatttaataaaagtttgagaggggcgtaaggttatgacaatttcaaaaataccacaagcagaattaaaagttatgaagtttatttgggaaaaaaatgatacagtaacatcaaaagaaactattgaagctatggaacgaaaatatggttggaaacaaacaactacattgacacttttatcaagacttgttaaaaaacattttttaagtgcagaaaaaatagatagatacactcattatacaatagttgttggacataaggagtatttaagtgttgagacaaaagattttttaagcaatatacacgacaattctttacagagtttaatttcagcactacatgatgatgaagttgttgataaagatatgttggatttatttgaaagtcattttaaaaatttagaagaagagtaattatatcaggataaaactctaagaatttaattaatctatggctgaaaaccataaatggtattatttaatcagctactcactattcataaagtaatattaaataggttctctaattagtaaaatacctaaaataattggaatagggagtatcaagttaaatgataccacttatttaaataagaaatgatttttaaaatttaaaataattttataacttgtcaatattcattaatctaaagtattatttctatttaaccatatcaaaatatattttactatttttaattattacaatataaacctgtcttttgttattataggtaaactaaaagtaagaaatgatttttatatttttaaactttattattggtaacttatctgtaaatattttaaaatgtactatagaaagttgttaaaaatattaaataattatattaaatttaagtgtgttttttatgctataattagtatgtattttttatgatatattttataaaaaatataatttaatcatttttgaggatattattatgttagatgcatttataacaattgtttcttctattatagaaatatggtcatgtaaaaaagtttttgattatactagtcagtcaaagaccgacttaaaaaaactaaatatgtattttctcttttctgtttttcttattatttcttctttatatataaatataggagctaatagtagaatcttgatatgtatatttgtaatgttcgttttctataagtctaactataaggttaatatatataaatgtctggtaatctcatttttttattggttaatattaataggtataaatggattaagtatgttattagtagcaacagtaagcaatttggataatatgaatgttttacttagtggcagtttatatagatatgaagcaatattcttgggaaagataatgttaggtatattactttatgtttataaggcttcttttaaaaattttaaaataagtaaaaaagagatatacatatgtattcctatgatagcaaatttattgtcattttttgtactttatgattatattattaatcttgtaaaaatctctcctgaaagaagaactgcttttttagtaatagttttactattaatattatctaacatttcaatctttgtattaatacatataatacttaagattaaaattaggaaaataagataaattttaatacgattcatttaaattaaaagttaataattacttttttatgtataattttacatgaatttctataaaagttattttattaaagatagatatacttatatatacggatatgattaaaaaaagtctttttaactttaaaaattaatgttaaaaaataaacttatacattaatattaataataattatttaaatatcttaagtaaatcagtcttacatatatttccgatagattatattgataaaaaacactaaaattaaattaataaaagtacttggagggatggaaatgaaagaggaaaattttattaatgttgaatacgaggataaacgtttttcaattaatagtaaagaagttttgtacatagaaaagcaagagtatgaagtaaagatttatactgaaagtggtaattatgaagttggagaaaatgctccttgtataagaaaactattgaaagaagaaaattttttcaaatgcagtaatagttatattgtaaatctagacaagtgtgaattttatctcagcaataattgtatttttgtgaataataattttataagaattttaggttcagaaagaaaaaagaaattaaaaaagaaattagaaaaattatatgattatgaagattaatattgggaggctgtattttatacagcctctttatttattgattgtattattaataaattttaaattatgataaaatataaaacaagtaacttatttcagaataaaatactttttaaaagaaagggacgagatatgggagattataataaaatgattgaattaaagaataacttaggtatcagtgaaagaaagttaaaatatccttgtatctataaacattttaaagggaaatattatgctacaatgggtcttagcaaggctattgatgatatagaaaacatatgtgaaatatatggtaaagaaaatttaatccaaaacagaaataaatataaattagttattagacatactgaaagagaagaagatatctatgtttatagggatttagatggaaacctttatcataaaaaagaagaagatactaatgatttagttttatacaagaccttatatgatgatacaggaatatttgcaagacctttggatatgtttttagaaaaagtagatacagataagtatgtcaattcaattcaagaatacagatttgaagaagtatataaataatataagagaaatatgtttataaatttagaaaaattctttaacagtacaataatttgcagaaatacaaatgagatttattgtaaataatatgttagattagattataaaatagaaacaaagtaaagtattatatgatataattaagttttgagaagtgataatttatatttaataaaaaataggcatatattaggaggacatatgggaaatactttttatatagtaagacatggacaaacggattggaatatattgggaaaaacacaaggtcatggtaattctgaccttacgcctcaaggtatagaacaggcaaaagaactttctgaagatattggcaagtattcaattgattatatttttagtagcgaccttgggagagcaatgcaaacagctcaaattttaggagataagctcaatattgaagttcaaaaaactgaggcacttagagaaatgggattcggagtttgggaaggccttttaataaaagaaattcaaaaagattattcagatatatatgcaacatggagaaatgaaccacacttagtaaatataccagaaggcgaaactcttaagattataaaggaaagagtagatgcttttataaaggaactaaatgaaaaatatgataataaaaatataattcttgttacacattcaattacattgagggttatgttgttgtcatttttagaatcaggtatggaaaatatatatagaattaagcaagataatactgctttaaatatagtagaatttaaagattatggacctgttatagtaaaaatgaatgatacaagtcatataaaaaatcatgtaaagataaataattctgcactggagtaggaatcaattataaggagaaatttatgagtaaagttatagtagttggtggaggagcttctggaatgatggcagctttgtcagcttcaaaaaacaataatgaagtaatattagttgagagaaatggagaattaggaagaaaacttagggcaactggtggcggtagatgcaattttaccaataatagagagatagaagatttttttgataaagttgtcagtaataaaaaatttctctatagtagtttctatacatttacaaataaagaccttatttcgtattttgaaagtagaaatttggaatataagattgaaaaagaaaatgaccacaaagtatacactaaaaatgataaatctatagaagtaatagaagtattaaataaagatttactcaatcacaatgtaaagataatgtataataagaaagttatagatattataactgaagaaattgctctaaaagatgattctaataaggacaagtcaaagtatctaataaaagggattattttagataatggagataagatactaggagacaaggttattatatcaactggaggagtgagttattcaaagacgggttcagatggttcaatgtataagattcttaaaaagcatggacatacattaaacaaactatatcctgctttagttccacttacaatagaggaaaaatggattaaagatttacaaggaatatccatgaagaatgtggaaatatcttgtaagattaagaaaaggaaaatatcaaaatctggagacatgctatttgcccattttgggataacaggaccttgtgttcttataatgtcttcttatattaacaagattattgaaaaggaaaaggtagaattaaatatagatttcttaccaaatttaagtactgatgaaatctctagtataatcagagcatttccaaataaaaatgttctaaataatcttaagcaaatactacctcaaaatttcttaagagagattttttctctattatctttagttgataaaaaggcaagtgatttgtctaaggcagatgaaattagaattattgagtatataaaaaatatgaagctaacttgtaatgggactacaggtataaacactggtatggttacttctggtggtatttcagttaaagaaattaattcttctactatggaatctaaattagttaagaacttattttttacaggtgaagtaattgatatagatgcagaaactggtggatataatttacaaatagcattttcaactggatatcttgcgggtataagtgtataaatataattttttaataattaaatatgaataaatagaggtgtatatatgggtaatttagttatagctgtagatggtccagcaggagctggaaaaagtacaatagccaagatagtagcaaaaaagctaaatataaattatatagatacaggtgctatgtacagagcagttacttataagtgtttaaaaagtggtgttgatgtcaataatgaaaaagaagttattcaaatagctgaaaattcggatatagattttaaagataacaatatatatttggacaaagaagttataaatgaagaaataagaacaatagaagtaagcaataatgtttctaatgtagcaaaaataaaagaagtaagacagttgatggttgaagttcaacgaaaaataggaatgaaaagttcagtaatactagatggtagagatataggttcatatgttttcccagatgcagattacaaattctttttagtagctactccagaagaaagaggaaatagacgctataaagaactttgtaataaaggatataatactactttagaagaagtaattgaggatataataagacgagatgaaattgattcaaatagagaatttgcaccattggtaaaagctaatgatgcactagaaatagatactacaggaaaaactatagaagaagttgtagaagaagttgtatctaaaataaatctttagttttttatgcatcataatgaaaataaatgtagtgttgaagggagataaacgtgaatttttatagatttgtaataaatatttttaagggtttttctaaaatattttttaaatatgaagttataggtgcagagaatattccagatagaggaaatatagtaatagcatcaaatcataaatcgaatcttgaccctatattcttggctgctgccatagaaaatagggaaatagctgcaattgcaaagaaagaattgtttaaagtaaagccattgggatttatattaaaaaaattgcatgttatgcctataaatagagaaaaaccagatgtatctacaataaaaactattttaaggtcagttagagatggttatgtattaggaatatttccagagggtactagaataaaaggagattcttttggtaaggctaaggcaggtctttctgtatttacaataaaaagtaaatctaaagttgttccagtatcaataatatctaaatataaactttttagtaaagtaattgtatatattggagaaccaatatcatttgaagaacattttaaggaaaaattgagtaatgatgaccatgaaaggatatcacaagagattttagaagtgataaaacaaaattactttaaatattcaaaataagggggtaaagttatgaacataaaaatagcaaaaaatgctggcttttgttttggagtaaaaagagcaatgaaaatggcatgggatgaagttgaaaaaaatgattctggcatatatgctttaggtcctcttattcataacaagcaagcagtagcaaaatatgaagaaaaaggtcttaagactgtgaatgaaattgatacaataccaaatcatgaaaatatgataataaggtctcatggagttcctgaaaatatatataaggaagccaaagataaaaaattaaaaattgtggatactacatgtccatttgtaaagaaaatacatacagtagtaagtgaatatcataataaaggctatgaaataatagttattggagatatgaagcatccagaagttataggtataaatggatggtgtgaaaattcagctataataataaagaccttagaacaaatggaaaatatggaatttaataactccaaaaaatattgtcttgttgcacagactacaataaatccagagttgtatataagtatagttaataaactatcagataaattagaagaaatagtatttaatgatacaatttgttcagctacaaaaacaagacaagaatcagctaaagagttagctaaagaagttgattgtatgatagttataggaggtaaacacagttcaaatactcaaaagttagtaaaggtttgtgaagacttagtaccaacttttgcaatagagactaaagatgaattggatgtaaatacgcttaaaaaatataaaaatttgggtattacagcaggggcatctacacctaattggataatagaagaagttgtaacattccttgaaaatttataatttgataggtaataaaaataggtggacattgttataatttatcataatatccacctttgatttcatattacatgtggtaaatagataacctaatatcaaaaagtgtgtatcttaagatgaaaaactaagagtataagatgcgcactttttaatattaaaaattcaaaagaaatattgatattgattatcaatagaaaatagaatataatataattgttgcaaaattagtctaggaggtaaattaatggaaatgttgatatccgcttctgaagaggcgtttttacatgtaggttctatgattggattttttattttgttatttggatatattaattataaaactagtggaaattttactaatatcatatcaaaaaacagaaaatttcaacccttaataggtgctttaattggagctataccaggttgtggcggaagtctggcaataatgccattgtatataaatggaaaattaagctttggagcaataattgcaagtttaatagctagtatgggagatgcagcatttgtacttatttcatcaaatattaaaatgtatttttttgtcactatagttagtacaattacaggaataataacgggacaattagtggattactttaaactagaagaaaaattagggttaaaaaaccgtagaaaatcagataaatatgatataagtaaaaataaccctaaagaaaataaagaacaacataatcatgatgaaataattttagacactctagctaaatctcatggaaatacaaatagacttgcatttataataacacatggaaagggatataaattttatataggaattatagtaatcggttttatatttatgtcacttgctcactctggacttaatcttcctataattgagaagttacattcattggaagaagtaatagcagtgattggaatattattttcaataatttatatgtggtgttttaaaaaggtatttaaaaattctaatcaaaaagaggaagaaaataaaaagatttctttgcgagaaatgcttatccattctgttggagaaatatcatttgtaattacatggatttttattgcatatcttatttacgatttgataatattaattttaggtggagatgaatacttagttaaactagtattatcaacaggtgtaataagtgtatttataggtgcaggtcttggacttattccaggttgtgggatacaaattgtgcttatgtcattttatttgaagggaactataccacttggtgcagtgatagccaactctatttctcaagatggagatgcacttttcccacttttagcaatggataaaaaatcttctttatgggctatgattattactactataccagcaatacttgtaggtatgatagtttatgcatttttaggttaaatataattacgaataaagaagtattaaaaaaataataaagcacataaatttatttataagaatagtgaagattaaatataaaaataaaaaattcaatatgaattaaattattgcttaaatattaatgagaacatgggagataatattattcctcatgttctctctatttaattaaaggaattatggaacaaatttcaagtgatactttctatcaaaactcatatataatatatattaataaattaaactataatacgtaatacagccagtatattgatataaaaaacttaggaggagttgtaaaaatgggtaatttaaaaagacagtgtgatgtttcaagtggaagagaaaaagctgacattgtactaaaaaatgggacaatcataaatgtatttacagaagagttaataacaggagatgtagcaatagtaggagacactatcgttggcattggcgattacaagggcaatgtagaaattgattgtagcaataaatatatatcacctggctttattgatgcacatatgcatattgaatctacaatggtaatgccaattgaattatcgaaaaaattattaaaatcaggtacgacaactatcatagccgacccacatgagttggtcaatgtaaaaggagctagtgcaatagattttttattagaatcgacaaaagatataccacttaatgtatatattatggtgccttcatccgtacctgcaacaagttttgaaactaatggagttggtaaatttagtgcaaaagacatggagagttatgtaaataatcctagaattttaggtttaggagaggtaatgtgttttaatgatgttataaattctgaaaatgaaatcttggataaactagagctttttaaaaataaagttgtagatggacatgcacctaatataaatggtaaatcacttcagacatatgtatgtgcaggaatagaaaatgaccatgaatgtataacttttgatgaagtatatgaaaaattgagagcaggattaaaaattttaataagagaaggaagcgcagcaaaaaatttaaagtctatagtaagtggtatgctaaagcataacttgccaattgaagaatttatgttttgcacagatgataagcacttagatgatatagaaaaacaaggtcacataagatggaatataaaatgtgcgattgatttaggtatggaacctgttagggctataaaagttgcaacttataattctgcaaaagcatatgggttaaggaaaattggagcaataggtgcgggttataaggcagatattgttgtattgaatgatttagacaaaatggaagtggatagtgtatataaagatggtaatttggtaaacgaagagatgttttctaattacaattatgagattaaagataaagaattgcttaatacagtcaagtttaagtatattaataaagaaaaaatacagttaaaagtaagtgaaaaaaattatgtaatggagattgtaccttatcaaattttgacaaataaggtatatgaatctttaccatgtgcagatggatattttgttccaaataaagagtattcaaaactttgtgttgttgagagacatagaatgactggaaatgtagcaattgcttcactaaaaggatttggcataaaaaatggagcaattgctactactgtggcccatgattctcataatattatagttgcaggggataatgatgatgatattctagtagctataaattacttaaaggaaatacaaggtggttatgtaattgtatcaaatggaaaagttcttgcacacctaagtcttcaagtagctggattaattagtacttttacagctgaagaagtacaagaaattactgataatatgttggagatagcaagaaaaatgggagttccagagtatgtagacccttttattacactttcttttatggcacttccagttgttccacaaataagacttacagatttaggtctatttgatgttgaggaatttaaatttatatagataatataaaagtaataataaatgaggctttctcaaaatagggataagtctctttttattgttgaaatgatgaaaatatatttgatttcatacaaaaaagagcatctaatgaactaaaaattttatttttagatatccttattttaattaatctatcatttaaccttgttttaagcatagatatcttaataaaactattttcagtctattttagaatataaatacatgaaaattatatatttatgaaactttatacataaaaaataaaatattttatttatatatagatttatagggtaataatataagcatagtataaaattattaataaaaacaaaaggagagatatttatgttgagtataggaacaaaagcaccagaatttacactagaagataaagatggaaataaggtaagtatgtcagattttaaaggcaaaaaagtagtagtatatttttatcctaaagataatacaccaggatgtacacgtcaagcttgtgcttttagaaatgcatatgatggatttaaaaaggaagatatacaagttattgggataagtaaagatagtataaaatcacatcaaaaatttgcagaaaagcatgaacttccttttattttactttctgaccctgacttagttgctataaaagcttttgatgtatggaaagagaaaaaaatgtatggaaaaactgcattgggagttgtacgtgcgacatatattatagatgaaaatggaattattgaaaaagtctttgaaaaagcaaaaccagacacaaatgcacaagagattcttgaatatttggaaaaacaggagtaataagaatttatgattataatgttatcaccagctaaaaatatgaagaatatagaagtatttgatagagatttgagtttgccttgttttatagataacacaaaagaaatagtggaaaatataaagacatttggtatagaagattttaaaaataaaatgaaaattaatgaaaaattagctgtattaaataaaaatagatttgaaagcattaaatttgatagattaggaaaccctgcaatcttaacttatgatggaatacaatataaaaatatagaagcagaaaattttacaaggaaagatgaagagtttgcaaatagctgtattcgaatcataagtggattgtatggtgttgtaaaaccatatgatagtatatatgaatatagattagaaatgcagacaaaattacgagtaggtgagtttaagaatttatacgaatattggggaaatcgtatatataaagaactaatcaaagaaaaaacagctatcattaatctttcatcaaatgaatacagcaagtccatagaaaaatttattaaagatagtgatacatatattacatgtacttttaaagtaaataaaaatggcatattgaaagtggaatctacacaagcaaagaaagctagaggtatgatgacaaaatacattgtaaaaaataggataagagatattgaagaactgaaaaagtttaatttagaaggttataagtataaagaaaacttatctaacaatagtgaatacatatttgtaaaagagtagaagttttgttaaatattaaatggcattgttaaatttaggtaaaatatacttagtgtgtattgaattgaacttgattttaaaatataattattcttaaattaaaaaaagaaaggagtggtcttccaaaatggaaaatcacaaacagatgccttggcattcaagagcaacgcatgaaattttagaaagtctagattcatcagaggaggggctcaccgataccgaggcggaaaaacggcttaaagagaatggcttaaatgaacttagaaaaaaaccacctagaacaactttacaaatgctttggagtcaaattacagatgctatggttatgatactaataggagcagcaatattatctttgatatttggcgaatttacagaagcttttgtaatactaataattgtaacagtaaatgcagttattggaattgttcaagagaaaaaagcagaatcatcattagaagcattaaaaaatatgaactcacctacagctcgtgttatgcgtgatggtgaagaaaatgttattccagcaagtaatcttgtagtaggagatattgtttttttagaagatggagctatggttccagcagaccttcgtttaatagaaacatcaagtttaaaaattcaagaggcttctttaacaggagaatctgttccatcagaaaaagatgcagatacaatcttacctaaagaatgtgtattaggagaccgtagcaatatggcgtatacatcttcaatagtcacatatggtagaggtgtaggtgttgtagtagcaactggtatggatacagaagtgggtaacatagcacatcttttagattcacaagatgattttgatactcctataaaacgtaaacttaatactgttggaaagacattaagtgtcataggtattattgtatgcgttgttatatttgcaataggtgcattttatcagagacctctcttgccaatgtttatgattgcaatttcccttgccatatcaattattccagagggattacctgcaacagctactattgtaatggctttaggcgtacagcgtatggctaaaagaaatgctttaattagaaaattacctgctgttgaaacattaggaggagctacagtaatatgttgtgataaaactggtacattaaccttaaataaaatgactgttacacatattgctgtcaatggagattttgaatctggaaaagtgacatcaatagatactgcatctgaaaaacatccattagtgtataaagagattgtttatgctggtgcactttgtaatgatgcatgtattaatccagataaaacagatgaaatattaggtgacccaacagagggcgcattaatttttatggccaaaaaatttggaatagatcaagaagctcttgaagaagaatatccacgtgtatttgaacagccttttgattcagatagaaaatgtatgacaactgttcataatatagatgaaaagattattgcttatactaaaggagcagtagacgaaattctcgacctatgtactaaaatattaacttcaaaaggtgaaagaaacattaccgaagtggataaaaagaatatacacgaattatgtcttaacatgtctaaagatgcattgcgtgtacttggttttgctaagcgtgagatttcatctataccaaaagaagatagtgaaaatatagaatatgatttgacatttataggtatggttggtatgattgacccaccaagaactgaggtaattgatgcagtaagtacttgtaaagaagcaggtataagaaccataatgataacaggtgaccataaagttactgccacaacaatcgctcatgagttaggaatatggagtgaagaaaatactgtgatatctggtgatgaacttgataattttagtgatgatgaactagatgaagctgttaaaaatactacagtatttgctcgtgtgtccccgtttgataaacttagaattatacaatctctaaaaagaattggagaagtaccagcaatgactggggatggtgtaaatgactctcctgccttaaagtctgctgatattggtatagccatgggtataagtggtacagatgttgcaaaagattcttctgacatgattttaatggacgatagttttacaacaattgcttatgcaataaaagaaggtagacgtgtatatagaaacatacaaaaagttatacaatttttgcttgttggtaatatagcagagatacttacgttgtttgtagcaatattattaaattgggatactccgcttcttgctgttcatattctatgggtaaaccttgcaactgctacgcttccagcccttgctcttggagttgacccaccaagcagaaatataatgaagcaccagccagtgaaatcaaccactttgtttgaaaaaaatcttatacaaagagttgttacccaaggtatatttgtggcaataatgactattttagcatataaaattggtcttaatatagaaaatcattctgtaggtcaaacaatggcattttgtgtattagcattttcacagatgttacgagcatttagtcagcgttcaaatacagattcaatgtttaatagaaataatggtaaaaatccatttcttttaatctcatttttaacttctgcatttttaatagcagtaatactgtttgtacctgtttttagaaatgcttttaacttaacagttttaaataacttagagtggcttataacgattgttttagccataatgtctgtaattcaagtagaggttgggaaaattattaaaagaaaaaaaagaaaaaaatagttgacaaaattaggaaaaatatataagatataaaacatagaaaaattaaataaatcttatccagagaggtggagggactggccctatgaaacccggcaaccagtatatttatatacattggtgctaaatcctgcggcgaaagctgagagatgagtataattaagcttatacagagcctgagttatatactcaggctttatttattttaactctcatctgataaatagtttaattttttttactaaaatctaagggggatacaagaatgtataataaagaaacaatatgtgtgcaaggaaattataaaccaggtaatggagaaccaagagtattacctttatatcaaagtacaacttttaaatatagcagtatagaccaacttgctgaattatttgatttaaaagttgatggacatatatattcaagaataagcaatcctactattcaagcttttgaagaaaaaataagtttactagagggtggagtatcttctgtagctgtatcatcagggcaatctgcaaatatgttggcagttttaaatatatgtaaatcaggagatagtatactttgttcttcaaaagtatatggaggaacattcaatttactaggacctagtcttaaaaaatttggtatagatttaatatcgtttgacttagattcaagtgaagatgagatagtagaacttgcaaaggaaaatactaaggttgtatttgcagaaacacttgcaaatccgactcttgaagtcatagattttgaaaaaatagcaaatgtagctaagagaattaatgttccatttattgttgataattcattagcatctccagtgctttgtaaccctttaaagtatggagcaaatatagttactcattctaccacaaaatatttagatgggcatgcttcaagtgttggaggaattatagtggatggtggaaactttaactgggataatggaaaatttccagaattagttgagccagacccaacatatcatggaataagctatactcaaaaatttggaaatgccgcatatgcaactaaagcaagagttcagttgcttagagactatggaaattgtttaagcccattcaatgcgtatcttactaatttaaatgttgaaacactacatcttagaatggagagacatagtgaaaatgcacttaaaatagctagatttttagaaaaacatgaaaatgtagattggattaattacccaggacttgaagataacaagtattatgagaatgccaaaaagtatttatcaagaggatgtagtggtgttttatcatttggagtaagaggtgggttagaaaatgccaaaaaatttgtggaaaaattacagatagcatctttggttacacatgtttcagatgtaagaacttgtgttatacatccagcttcaactactcatagacaattaacagaagaacaattaattgcatctggagtattgccttcactaataagattatctgttggaatagaaaatgtagaggatttaatagctgatttaaatcaagctttaaatttctaatattctaagagaaagagaagtgaaaagatatggctttaatactaccaaagggattacctgttattaataaattattagatgaaggaatagatgtaatttataaagaagattttaaaaaggaattaaagtatgaagaaaacatagacactaaaatagctatactaaatctaatgcctataaagatagatacagaattagatttactaagaaggatagataaaacaggattcaacgtgtctgttgaatttattaaaatttcaacaagagaaagtaaaagaagttgtaatgaatatgttaaagaattttataaaacatttgatgaagccaaaggagagtattttgatggctttataataacaggagctccagttgaacaaatggagtttgaagaagttgattattggaatgaactagaagaaattatggattattctaagagaaaaactaaatctacattatatatatgttgggcagctcaagcaagtctttacaaatactacaatgtaaaaaaacttccactaagtcaaaaatgttttggagtatttaagcataaggtagataaagatagtaaaatagtagatggatttgaaaatgaattttttgctccacattcaagacatactactgtaaatattgaagctttgaaagagaataaagagttgagcattgtgagtcattctaaagaagctggtccctatataattacaaattcaagagatgtgttcgtaatgggtcatagcgagtatgacaaatacactcttgataaagaatataagagggatataaataaaggagataaaatatctatacctcaaaattactatattaatgatgacccttcagaagagccaactgtaaaatggaaaaaacattcagaattgttgtttagaaattggataaaaaactatttgatacaataaattttaagagtatataaatgttaactaaaaaaatatagaaatttataggtataaagttaatcttaatgatactttataccttattttttttaaatttaaccttataatagtagttttatattttaagaaaatcactttaggtgtatgtagatagaggtggttttaattttatatatggtgcgataatgggagactaaacctttatagtatcaataaatttgtattttaacttttaaaagagattaaaaagggagaaatcagtgtaaaatatatatatcgattttttattaaattttattaaaaatatcctgtataaaattaaatatcaataagataacaaaattccaattgaagttacaatattgtaattgacaataaatacttaatactataatatttaatacattaaacattatagtattaagtatttatttacagtatgcacttcagcctaaatttgaaataaagtattttcgtagggagcgtttgtatggatgagatgagttttaagaaagagctactagagttgactagagatataaatatgaaatttacaactttattaagtgatttttatcagccacttggtattacagcagtgcaagctttgattttatctgagttatgtgaacatggagagaaaaaaataagcgatttagggaagaacttaaacatgacaaatagtaatgtatcagtaatctgtcaaaggcttgaaaaaaatggctttttaaatcgcataagagatatagaagaccaacgaattgtaaaagtaaaagttacaaataaatcattggatatacaagaacatatttcaagtagtatttttgatagttattttgaaaatatgaccagtgaaaaattgcaagatatggaagatataatagaaggtttagagaaattaaataaacttttaacttacattgattgcaaataacataaaaataatttaaaggagaataaaattatggatgaacataaaccccaaaaaaggtcagcactctattattatacagttataataatagtagtaatgtttttaaatgctttaatatttccaagtttaatggataaaaaaatggttgagattgactatggaaagtttctcacaatgttggatacaggaaaggttaaatctgttgagatagaaaataatagaatagcaataaatccatctagtagcaaggataagaatatatacataactggtagaatggatgacccagaattggtagatagactaaaaaatgcaaaagtagaatttactaaggttattcctaaggaaaattcacctcttttaagtattttacttacatggataatacctataggtattcttatgctatttggtaacttaatgatgaagtctatgcaaaagcgaatgggtggtaatgctatgcaatttggaaaaagcaacgccaaaatgtatgtatctgctcaaagtggaaaaagatttaatgatgtagctggtcaagatgaggcaaaagaagctttaactgaaatagtagatttcttacacaatccagaaaagtataaaaagataggagcacaaatgcctaaaggagcacttttagtaggacctccaggtacaggaaaaacactccttgcaaaagctgtagcaggtgaagcaaatgtaccatttttctcaatatctggttctgagtttgttgagatgtttgtaggaatgggagcttctaggattcgtgatttatttaaacaagcaaaagaaaaagctccatgtatagtgtttatagatgagattgatactattggtaaaaagcgtgataatggaagtggattaggtggaaatgatgaacgtgaacaaactttaaatcagttgttaagtgagatggatggttttgatggtggaattggagtagtaatacttgctgctacaaatagacctgacagtcttgacaaagcattacttcgtccaggaagatttgatagacgtataccagttgaacttccagaccttggaggacgtgaagctatattaaaggtacatgctcaaaatgtaaatgtaagctcagatatagattataatgcaattgcaaggtctacatcaggagcatcaggtgcagaacttgcaaatattgtaaacgaagcagcacttttagcagttaagtctggcagagatatagtagaacaacaggattttgatgaatctgttgaaactgtaattgctgggtatcaacgtaaaggagctgtaatttcagataaggaaaagaaaattatagcatatcatgaaataggtcatgcacttgttgctgctatgcaaaaacattctgcacctgtccataagattactataatacctagaacttcaggagcattgggatatactatgcaagttgctgaagatgagagtgtacttatgtctaaagaagaagcaattgataaaataactacttttacaggtggtcgtgctgctgaagaggttatctttaacacttgtacatcaggagcatcaaatgatatagaacaagctactaaaattgcaagagctatggttactcgccttggtatgagtgaagagtttgatatggtcgctcttgaaactgtaagcaatcaatatttaggaggagatacttctcttgcttgttcttccgacactgctgctaaaatagatgaagaggtatttaaaatagtaaaggcttgtcacaaaaatgcaattgaaatcttagaaaataatattgataaattgcatgaacttgctaattatttattagaaaaagaaactattacaggtgatgagtttatggaaatacttaacttaaactaaaatgattatacacaagataaaaatgcctattgttaggcatttttattttacaactaaattttttaaattcatatttaaatctttacataatcttaatcattaaaaatacatcttaactacaattttatatcggaattgatattataatagtaatgaatggtgtaaggaggttttttaatggatagacctaatcctgatattctattagaaaaaattaaaaatgaagaagaaaaactaagtagaggtcaattaaaaatattctttggttatgcagctggagtaggaaaaacctactctatgttggaatctgcacaaaatttaaaaaaagtgggtgtagatgtagtagttggatatattgaaccacacactagaccagaaacattggctctacttgatggcttggaaattcttcctgtaaaggagatagaatataaatctataaaactaaaagaatttgatttagatgctgctttagcaagaaaaccagaagttatattagtagatgaatttgcccattctaatgttgctgggttaaggcatacaaaaagatggcaagatatagaagaattgctgttagcaggcataaatgtctacactactgtaaatgtacaacatttagaaagtctaaatgacattgttgaggtaattacaaacgtatcagttaaagagactataccagataagtttttggatacaaatacacagttagaacttatagatgttgaacctgatgtacttcttgaaaggttcaatgaaggtaagatatataagaaagaacaagctactagagcaaaaaataatttttttataaaagataacctggttgcacttagagaaatcgcacttagaaaaacagcagagagagttaataaagaagttcaaatgaccagactatcaaagggtgatgtaactgtaatacctacatcagatacacttcttgcatgtataagtccatctccatcttcagcaaaagttattagaactgcatccagaatatcagacagtacatttgcaaaatggatagctttatatgttgaaactccaaacacagcaagacttccatttgatgaacaaaaacaactacaaaataacctaaaattagctaagaaattaggtggagaaataattgttttacatggtgaaaatataatagagcaaatacttagaattgcaaaactgagaaatgtaacaaaaattgtaataggtagaaatcattcaagtaataaaagatttagtaaaagatttaaaaaagatatagttgacaaattaattgatgaagttgattatatagatatacatataattccatataaatttgcctcagatgttaaatacaaacctaaaaaggataaatcatcaataaaatctaaatttaaaattagcaaagttgattttataaaacttatatttattactttgatgataagtattttagcatatgcagtacaaagcatgggatttataagagaaaatatattgttaatatatatgttgggtgtagttttagtttctatgtggactaaagggtatagtacaggtataataagttctgtatttaatatagttcttttaaattatttttttacagcaccattatatacattatctatagcagattcaaactatatagtaacactggttgtattctcaatagtaggtataataactagcactcttacgtctaagatacagcatgaagcagaaactgctgctaaaagagaagaaaatacaaaaatgatatatcaaataattaagggatttttaagattatcaagtaaagatgatatagtaaacaaaggtatagaacttttgtctcttagcttaagtagagatgtaatttgttatttaaatgtagataagcataataaatcaaaactttacaaaaaaaatactaataataaggataaaaatgatttggatagtgaagatgaaaaagctgttgcaagttgggttttatccaattcaacagtggcaggaaatgacacggatacacttcctggttcaaagggatactatataccaattgtaggaatgaatttaactttaggagtagtaggaatatcatgtattgattcaaaattggatacagaagatataagcttaattgaaacaataattgctcaaatggcaatagcgcttgatagagaaatcttgtcagaagctaaagaaaataccaatcttgagattgaaagggaaagattaagaagtaatcttttaagagcagtttcgcatgaccttagaactccactagcaggaatatctggtgcagtaagtacaattataaaaaacaagggtactataggtcaagatataatagatgaattacttagtggtgtatatgaagatactcagtggttaataagacttgttgaaaatttacttagtatgaccaagatagatgaagggaaattggaagttaaaaaacattctgaactggttgaggaaattatatcagaagcgttacaaaaaataaaaaaaagaattgaaaatgcacttatagatattaatataccagaacagatattatttgttcctatggatgcaaaattaatagaacaagttttaattaatttaatagataattctttgaaatattcaaaggaagattgtaagatagagataaatgtatacgagaaagatgattatgtttggtttgaagtatctgataatggtcctggtatatcaaaggaacttaaaaagcatatctttgacagattttttactggagaagaaggagctaaagattccagaaagggtgttggacttggattatcaatttgtaaatctataattcaagctcataaaggtgaaattatggtagaaaacaataaagataagggttcaacttttaagtttagtttgcctaaggaaaatgaatagttttaaattttaaaattagttttggaggaagaaatgagtaaaaaacttatattgttagtagaggatgataagacaataagaaaatttatatctactgcacttttaacacaggattatgatgtcaaggaggctataactggaaaagaaggtatatctattgctgtctcatattctccagatgttgttcttttagatttaggcttagaagatatggatggaatagaggtaataaaagctatcagacaattttcaaatataccaataattgtagtttcagctagagagcaagatagagataaggtagaagtatttgatgcaggggcagatgattacttaacaaaaccattctccatagtagagttattagcaagagtaagagtcgcatttagacattcacaagtagaagctcaacaaaaagatgatgttaaatctacgtttgaagtagataaattattgattgattttgataaaagaaaagttattgttgatgatgttgaagtccatttgacacctattgaatataatattctttcattacttgcaaagcatcatggaaaagtgcttactcataattttataataaaagaaatatggggtagtgttatagggaatgagactaagtctttaagggtctttatggcaacattaagacgaaaaatagaaaaacaacctgcaaacccaagatatataattacagaagttggtgtaggatacagattaaatgatgaatagttgtaatatattaattattagattatgtgcttattaatatatattaaaattatatagtttagttaaaataagaatgaagtgtatgtgcttgttgtcagtttagcacatgcattttattttttagctttttagtatcaataatatgaaatatgttttaaaataagtatatagtgtaatctgtaataaaaactttggttaaataataaatgtatttaacacttaccttataataaatttaatgtaaatattaaataataattgttaaaatagtgtaaaataattacagtaaggattataaaaaatttttagaatgtaaattgaaatttaggagtagatgtatgtatatactgaatttaaatacaagagagactattgaagattttagagataaattttatgtagcagaaaattcttatcttatattaagtgctccaaaaaatttaaaattgcttaaggaaactttggatatagatgaaataacttttaatgattgtcttaaatttgatgaaataaccaaacttgatttatttgataattacgattttttaagcctaaatacatttgaactaagagatggagaagctgttatagaagaagtaaatatgtatttatcagataattttatattggttgtagtgaatgaagaacactttttatttgaatttgtaaaaaatattattttgaagaactctcaacttgaaaaaaatccagttattaatctatttaagataaactacttgattcttagagaagttataaaaaatggttttgagtctttggaaaaagttgaagagttaattcttcaaatagaagatgaaatgatggacaacattaataagaatcatgtatctagaataagtgatgtaagaggattaacaagaattatagttaagaatactagacctcttttgtatattggggatagaatagttaaggaaaatataagatatttaaaatattcaaatgtaaaaaaatataatttagaaaattttcaaggtatagattttggaattgacaaattatacaatttcgcattgtcaacacgagagttagcagataaattattagatatttattcttccagagtaggtgagaaaacaaataacttaattacaaaattaaccttgttaacagccatatcagcaccacttacaattataactggtatatatggaatgaactttagatatatgccagaattaaactggatttatggatatccagcaactttattttttatgctatgtataatttttattggaattataatatttaaaataaaaaaattattgtaaattacagatgatgtttaattgattttataaaaatacatcaattgagaagctgatttaagtaaataaaaaaatattttaaattgaaaatatttatagaaaatattgacaattatattttctttgttataattattaaacaagaagaataataaattataaaaatggaggataatactatgaaaggaatattaaaagaactaacagcaaaactttatagctttttttactttatgttctggggcttttattttagcgctggctatttcttttacaaaaatatatgtacttcctttctggtgaggccttattttagtgattttgagcataagtaaattttataaaaatgattattttatatatttatataagatttagtgcttgatagattattttagagaactcattagtgagttctcttttttattttaaatataaaattataatattgggaggtagtaaaaatgatagtagtattaaaaatgggagcagataaaaatgaagttaaaaaattaattgaggctattgggagagaaggagtagaagttaatcccatagatggaacagaattaactgttttaggtttagttggagatactagtaaaatagatgccaaaagaatagaagcaaataagatagttgaaaaagttatgcatgtagtagagccttttaaaaaggccaatagaaaatttcatccagaaccttcaatcataaatgttaatggaatggaaattggttcaaagaaaattgctatgatagctgggccttgttctgttgaaacagaagaccaaatagtatctatagctaaagatgtgaaaaaatcaggtgcaggatttttgagaggtggagcattcaaaccaagaacatcaccatacgctttccaaggattgaaatatgatggattggatttattaaaaaaagcaaaagaaaaaacagggcttcctatagttacagaaataatgtcaacacaagatatagatatatttgaagaaaatgtagatgtaattcaagttggagctagaaacatgcagaactttgatttattaaaagaattaggtaaaacaaataaaacaatacttttaaaaagaggattatctgctacaattgaagagtggctaatgtcagcagagtatataatggctggaggaaatgaaaatgtagttctttgtgaaagaggtataagaacttttgaaacatatactagaaatactttggatttaagtgcaattttagctgtgaagaaacttagtcatttaccagttatagttgacccaagtcatgcagcaggtaaatcatggatggttgactctttatctaaggcagcaattgcagttggagcagatggtctaataatagaagttcataatgacccagcacatgcactttgtgatggaaaacaatcgattaagccaaatgaatatgatgaattgataagtgaattaaagactatcgcatcagcagttggtagagaaatataatctataaaaggatggttaaacgtggaagaaaaactattagtaaatttaaaagaaaatagctacaatatatttattaaaaaaaatatactaaagaatataggagaagaaataaaaaaaatatattttggaaataagatttttattgtaactgatgaaaatatagcaaaattatacttggataaagtaaaaaataatttaagtgaatctggatttgaaattaaatctttaatattaaaatctggtgaagaaacaaaatcatttaatactcttcctaaaatatacgatagtttacttgactttaagttaactagaaaagatttgattattactttaggaggaggggtaataggtgatttaggtggatttgcagcagcaacttttttaagaggtataagttttattcaaattccaacatctttattagcacaagttgatagttctgtaggtggaaaagttggagttgaccttgagagaggcaaaaatttagtgggaagcttttaccaaccaaaagctgtgtttatcgacccaaatgtattattatcacttccagaaaaattctatagagatggaatggcagaagttataaaatatggatgtataaaagacaaaacttttttcaataaacttttaagtttaaaaaatagagaagaagtaatgcaacatatagaatacattatacataaatgttgctttattaaaaaaactgtagttgaagctgatgaaaaagactttggagatagaatgcttctaaactttggccatacattaggtcatgctattgagaaatactacaattttacgggttatacccatggagaagctgttgccataggaatgtataagataactttagaaagtgaaaagataggaattacaaaaaaaggtacatcagaacttataaaatcaattttaatgaattataatttgccttatgagattgaattaagagataataaatctatagtagatgctatatctcttgataaaaaaaatctaggtgatacattaaaaataatacttttaaaagatattggagagagtattatatataatactacttctaaattttttcaggaggtaagataatgggaagtctaaaaatatatccaagtaaattatctggagatgtaaaaataccaccatcaaaaagtatggcacatagggcagttatttgttcatctctaagcaatggaaaaagtagaatttctaatatagatttttctgatgatataatagctactataagagcaatgacatcattaggagctattatagaaaagaaagaagatattttagaaatttcgggaattttttctaaagaaggtattttaaatagagagaatcagttgaatcaacctaaattgacaatagattgtaatgaatcaggctctacattaagatttttagtacctatatctttagcatttgatggtgtaaaaaggtttataggtagaggtaatcttggaaaaagaccacttgatacttattatgagatatttgacagacagaatataaaatatagttacaaagaaaatcagttagatttgattatatcaggtaagcttaaaccagatgaatttagagtaaaaggaaatataagttctcagtttatcacaggtctattgtttatattgcctacactagagagtgattcaaagataataattactactgagctagaatctaaaggatatttagatttaactctttcaacgataaaagattttggggtagaaattataaacaataactataaagaatttattataaaaggaaatcaaacgtataaagcgagagattataaagtagaaggagattattctcaaggagcattttatttatcagcagatgctataggagaagatattagcatattagaccttaaagaagattctcttcaaggggatagtgaagtagttgaaattttatctaggatgggaatggaaatattaagagaaggcaacaaaataaaaggaataacaaatggtttaaatagtactttgatagatgcatctcaatgcccagatataatacctgtattatctgtagtagcatccttaagtatagggaggactacaataattaatgctggtaggcttagaattaaagaatgtgatagacttcatgcaataaatgttgagttaagtaaacttggagcaaatatagaggagaaagaggatagtttgataatcgaaggagtaagcaagttaaatggtggagtagaggtgtggagtcacaaagaccatagaattgctatgacacttgcaattgcttcttgtagatgtgataaaccaataatattaaaagattttgagtgtgtatcaaaatcttatccacatttttttaaagattttaagatgttaggaggtcgaattgatgagtggaatatggggaaataatttaaaagtatcaatttttggagaatctcatggaaatgctataggtataaatatagatggtcttccttcggggattgaacttgaccttgataagattgataaagaaatgaagagaagagcacctggaaaaaattctatatctacttcaagaaatgaaagtgatataccagaaattctaagtggatattttaatggaagaactacaggaacgccattatgtgcaatcataagaaatagtgatactcgttcaaaagattatggagagcttaaaaatttaatgagaccaggacatgcagatttcacaggtaatgtgagatattctggatttaatgactatagagggggaggtcatttttcaggtaggataacagctccattagtattttgtggggctatatgtaaacaaattttatcacaaaaaggaatagagataggagcacacataaaaaaaattaaaaatatagaagatatgagttttgattatgtaaatatttcaaaacaacagttatcaaatttgcaaactttggaactacctttacttgatttatcaaaggaagaagccatgaaaaatacgattatagatgcaaaaaatcaaagagattcagttggtggtataattgagtgtgcagtagtaggtattaatgtagggcttggaaatccattttttgactctgttgaatctactttatcacatttattgttttctgttcctgccgtaaaaggtgtagagtttggtttaggttttgaacttgcagatatgtatggctctcaaagtaatgatgaaatgtattatgaaggaaatcaagttaagagcaaaacaaataacaatggagggattataggagggattactactggaatgccaataattttcaaagtggcaattaagccaactccttcaattagcagacaacaaaacacagttaatataaaagataaaaaggacgatattttatatattaaaggcagacatgacccttgtatagttcaaagggctatacctgtaatagaagcagtaacagccattggaatttttgatttgatgaaaggacgataataatggaggatttaacgagatatagaaatgagattgacaatatagataaagagattattcaattatttgaaaagagaatgaatacagttcttgaaattgccagacataaaatgaaaaataacactactatacttcaaaaagatagagaagaaaaagtactaagtagagccatagataatttagataataaagcatactcacaagaaacggtacagttttttaattctataatggaaattagtagaggattacaaaaaagattgatagataatgatggtgagcagaaaatcgagtttagtttagattcatcaaataagaaatttgatttgtcaaatgtaaataaatataagtctttaaaagatgaattaaataaaaaaaatatcctagtaggatttccaggaaaatcaggttcatttacagaagaagcactaaataaattcttcaacaaaacaatatcaaaaaaacaatttaaagaatttgaagatgttttcatagcacttaaaaataaagaaataaactatggaataatccccatagaaaattcatctacaggagctatctctgaaacttatgaccttttgagaaagtacggtttttatatagttggagaagaatgtataaaaatagaccaaaatttaatagggataaaagacacaaaacttgaagatataaaagaaatatattctcatccacaaggtataggacaatgtagtgaatttttaaaacaaaatagtacatggaaattgataccatttaataacacagcaacaagtgcagaacttgtaagaaaacttcaagataaaacaaaagcagcaattgcaagcaaaaaagctgcaagtatttatgaattagaaataataagtccttgtataaatgatattgcaaacaactatacaagatttgtagtaatcagtaatcaaatacacattgaagaagaatcaaacaaaatgagtgtagtattttctgttgaacatgaagcaggaaaactttataaagtacttggatactttgctgaaaataatataaatatgacaaaaatagagtcaagacctatgaaaaatgcctcatggagatatttcttttatatagattttgagtgttctatatacaattctaaagtgtacgacttattagaattgatagaacataatacagcatattttaaatttatgggagtatataaaaataaaactgaatagataatataaatttttatttaatttataattattaggaggtgtaagtatgaattttttcggtctagtaggtgaaaaactctctcacagtgtttcacctcaaatccacaagagaatattcgagatattgaatattgaaagtgcttataaaaactttgaaattccaaaagaagatatatctaagctagacggtgctataaaattattaggaatacaaggagtaaatgttactgtaccatataaggagcgtattatgaaatatcttgattttatatcaccagaggcaaaacgtataggagcagttaatacaattttactcagagaaaatatgttatatggttacaatacagattactttggtcttgatagtatgtttaaaatggctaatattgatgttcaaggaaaagtagcagttatattaggaactggaggtgcttctaaagctgctcttacatattttattgattctggtatagaaaagctttatgtttcaactagaaaaaaggatgataaaaaattattaaatagtaaagctatattaatagattatgaagaacttaaacatataaaaggagatataatattaaatgctacaccagtaggtatgtaccctaatgtaggaatttcaccagtgtcaaaatctattatacaaaattttgatatattaatagatttaatttacaatcctggagaaacagagtttttaagaattggtaatagtatgggtaaaaaaacttgtgatggattatatatgctggtagggcaagcaataaaatctcaggaaatttggcaagatactaaaatagataatagtattttagatgttatatataatgaactaaaattagaatttttgtaagggagattgtcatgataaataaaacaaaagaaaaattgatattaataggtatgccaggtagtggaaaaactacaattggtaaacttttggccaaagaatataattgtagtttctgtgatatggatgattatataattcaaatatctcaaaaaagtatagcagagttgttttcagaaggagaagatatctttaggaactatgagactcaagcatgtagagaactttctataagtgataaaacagtgatatctacaggtggaggtgtaataaaaaaggatgttaatatggaaatactaaaagaaacaggtataataatttttattgatagacctatacaaaagattttggaagatataaatattaattcaagaccattattaaaaaacggaaaagatagattgtataatctttataatgagagaataaatctttataaaaaattttcagatatagagattttaaatgataaatcattaaataatgctgtatataatattacaaatgcagtcagtgaaaattttaaatttgactttaaagaaaaataatctagggggaaataaaaataatgaatattgttattgtaggactaggagttataggaggctcttttgctaaagcattaaaaaaagctggatatgaaaatgtatttggagtagatgtagatttagaaactttaaaaaaagcagaaaaagcaaaaatcataaaaaaaggatgtactacaggtaaagagttatttaaaaaagctgatttaattatactatctatatatcctagattagttgtagattttctaaataataataaaaacttttttaaaaaagggactataattactgatactacaggaataaaagaaacacttatcaatgatgtgttgcaaattattccagatgatatagattttatatttggacatccaatggcaggtagggaaaaaaagggtattgattttgcaagtgaacaagtttttaatggcgcaaattatataattactccaactggcagaaacaacataaaaaatttagagttagttgaaaatttaattttagagattggatttaaaagagtaaaaaagttaacttcacaaaaacatgatgagattatagcttttacttctcagttacctcatgttatggcagttgctcttataaatagtgatgaagaaggtagagatacaggtaaatttattggagatagttatagagatttaactagaattgcaaatatgaatgaagacttatggagtgaactttttttaggaaatagagataatttactaaaagttatagaaaactttgaatcagaagtaaatttagtaaaagaagctatatttaacaatgataaaaataaattgatagagtattttaaaaaatcatcaataagaagagaagctttagaaaaataaatattaatatttaagctatatatagatgggtataaatgtaagcgatagtgtatttaattgtattaataaatatggattcaatataattaaatatgctattgatatatttgtacccttaactattgttatcttttaaatgataatgatatttatttaaatgctctttattaacaatttataaaacttaattgtaaaaaatacttattaatagtaaaataaagtgaatcaattatattataattgctaaagagagtgaggtgtagctatttgaaaaaaaatagattaataataaagaatatatcaatagcatttatagtactattcttttttagtgtatttacattcttttatataggtaatattagtagagtattagaatatgaaacaaatgacataatgacagttacaattactggatggattatactttcatttttatttttatgtattataatttacatattatattcaaaagcaaagagtcaaaaaactatagaaaaagtagcatatacggattttgtaacaggttattccaactggagaaagtttgaattagatgttacaaatttattaaagaaaacatcacaaaataataaatatgcaatggtcatattcgatattgataaatttaaagcaattaatgatatatatggacataaaaagggcaatttaatattaaaagatattgcagatactttaaatgaattgactaatatcaatgaaacttttgctcgtgtaagtgctgataattttaatatattattaacatataacaaaaaagaggatataataaatattattaaaaaaattatagcaaataatgaacttgtaaacttatcttttggaatttatgaaatcaaagataaggatttatctgtaagtgtatatagtgatagagcttcacttgcaaaatcatcaataaaaaataatagtgatgtaaattttgcattttttaatgataaattaagagagaaattattacttgaagataagatagaaaaagaaatggaatatgctcttgaaagtgggcaattcgtaatgtatttacaaccaaaatataatattaaattagataaattttgtggaagtgaagccctagtcagatggcaatatacagaaaaagaagtcatatatccaggtgattttattcctatatttgaaaaaaatggatttattagaaaaattgatatgtacatattagaacaagcttgtaaagaaatccggtctttatttgataaaggaatttcacctttacctatatctgtaaacttctcaagagttgattttttaaaaaaagattttattgaaaacatagtaaatatatgtgatagatataaaataccatatagtttaatagaaattgaaattactgaatctagtatgtttggagatactgatactctatttaatgttagtagaaacctacaggatattggttttatagttgcaatggatgattttggctcgggatattcttctgtaaatatgcttaaaaatataccattaaatgtaataaaattagatagaggattttttgttgatgataaagatgttgataagagtcaaattgttataaaaagcatagtttctctcattaagcaattaggaataagggttgttgctgaaggaattgaaacaagaagtcaaatagaaatgttaaaaaaagcaaattgtgatattgttcaaggatattatttttcaaaaccattaccaattaaagaatttgaaaaattagtctataaaatatagtcagcgagtcttaaatgggaggtggtgattaagtgataagagcaaaatcgttaaaaaatgtactgagtattgttttaatatttttatttacaataatttctttttctgattttgcatttaaaactaatgtccaggaagaagaaaatagtaaaattaatttaagggaaatatccctacaaagttccaatgctataaaaataaaattagatagttctctatcctttattaaaagtgtggcaaatatggtttcttattttaatactatagataactcaaaaatagttccattattagctaacatatcaaaagaatctgactttcaaagaatctctattgtatctcctgatggaataagtcataccagcgatggcaaaattatcaatgtgtcaaaatatcagtattttaagaaagctattaaaggagaaagcaatatatctgaagttgtgaaatctccaattgatggaaaagatacttttgttatagctactcctatatttaataagaataacaaaataattggtgttttatacggttcttactacaatgataaattagctgaatttatagatataacaagttttaatagtgaagggtacatagatatatttgaatctagtggtcaatttgttttaaaatcttcacatacaaacaaactgattaagtcaagtagtaacatatatgatatatttaaaaaagcttcttttgatgatggttatagctataaaaaaatatatgaagatacaaaaaataacaagagtggctttacctcatatgaatacaaaggagaaaatcgttatgctacttatacacccattggtgtaaatgactggtatgtaatttctgtgataccacaatatactgtaagaagaaacattgataaaataaatcaattagcattttctcttattttcaaagtattcttattgtttattatgcttataatatatattatttataaaaacaataaatctcagaaagatatactaaaagctaacaaagaaatctcatctattacaaatagcattcctggaggagtacaaaagtgtaccctgggtgaaacatgcaatattaattttttaagtgatggatttatagagttgtttggttatacaagagaagaaataaaaacattgtttaataatgatttttatagtttaatacataaagatgatgttgaaagaataaaaaaagaaatttctaaacaactttacaaaaataaaactattgaattagaatataggattataacaaaaaatggtaatacagtatgggttttagataaaggagaacttataacagaacctgatggaaaagaatatttttgttgtgtaactgtagatattactagaacaaaacaattagaacaagagatggaacaaaaaaatctagaacttgaaatgatatcagaaaatattttaggtggtataattataacagaatttaatgatgattttactataaaatacactaactctggttatctttcaatgattggatatacacgtgaacaattagaaaatgaacttaaatacaaagcttgtaatcttgttttttatgaagatagaaagaaggctcttgaaagtatacaacatcaattaaacacaaaaggaatagctgtatatcaacatagaataagaagaagagatggtaatattatctgggtttctataaaaggaaggcttattattgatgatgatggtattgaaaaaggtatttggattctaaatgacataacagatttaaaaaatgcagaacaaaaacttaaaataaatgaagaaagatttagaattgcattaaagcaaacatcaaatactatatttgagtatgatataaaaacaaagtcacttttaaatactagtaaagagcttgataaatataatatttataaaattactaaaaacgttccatattctctagtagaatcaggagttattcataaagattttagtgatgattttataaacatgtatgaaaatgtaataaatggagcaaaaaaagcaagttgtgtagttaagatgaaacttccagatgaaaattatatatggaataaagttaccttgactactatttttgatgaagatggtaatcctgtaagagcaattggtatacaggaagatataagcaaacaaaaggaagcagagataagatataatcaagaaggtaagtatcattcagctatattgtcggaagcaatgataacctatgaaataaatgtatcaaaagatacttttatcaaaggaaatgaaagttggcaaaaaccatttggaattaagcctgacaataattattctgaaatggtaaaaactatatcaaacagtattattcacaaagacaataaagaggtgtttttaaatacatttttgtgtaaaaatttattatctgcatataacaaaaatataactgaaataaaattagaatatcgaagaatgaatcaagaaaataaaatgatttgggtcatttgcacaatgcacttaataaaagattctattacgaatgatataaaagcacttgcttatgttaaagatattgacaagcaaaaaaatgaagaaattaaattaaaattaaaagctgaaagagatactcttacaggattatataataaaggtactacagaaaatttgattaatgatttcttgaactctgacgaagcaagcttaggaatgcatgcatttttaattgttgatatagataattttaaatctgtaaatgataatttaggacatgtatttggagataaagtattatttgaagtttctaaacacctaaaacctatatttagaaaagatgatatagtaggtcgaattggtggagatgaatttatagtattcttaaaaaatattcagtcttttgagaataccaaaaagaaagcagaaaaaatatgcgatatatttagaaattcttatacggaaaataaaaagacatataaaatatctggaacagttggaatttcatttgtaccagaacatggaactgtatttgaagaactttataaaaaagcagacatagcactttattatgcaaagagcaaaggaaaagataagtatgcactttataataattgtatctaccaaaatgaacttgaaaataatataagtgataataatataaaattagcaaataaatgtgagaaatccaaaccagtacttaaagaaattcttgattctattgataattatatttatatagtgaatccaaatacttatgaacttctttttgtcaataataaggtgtctcgtttggatttagagataaaattaggagaaacctgttataaatcactattaaaatctgagagaccatgtaataattgccctcttaacggattagaagaaaataagcattcaaaattcaaaatagagacaaatacatttggtaaaaatatcagtatagcaagttggattaattgcatagatggagaatacaactgtcttatagagtgtatagattcttctttatacaaaaataaataaaaaaggactatgaagatatgttaaatagtataactttgatacttggtataatatttacaatttactatttttatctcaaaatagtttttggaggaatttcatttagtgagattttcttagttgtaggaattgtactaattatctatcaaatatttaagaaaaaaattaaagaaaagaaggttttttatagggtgttaaaaataataatcagcatttttttaatagtatttgtagttactgagagtttaattattttttatcctaaaaatagtttagaatcaaaaagtgattatctcttaattttaggagcttctgtaaaaaagactacaccaagtacaaccctgaagggtaggttagacactgcattgaaatacctaaaaattaatgataattgttatgtggtagtatctggtggtaaaggaagtggagaaaaaataactgaggcaaaagctatgaaagattatcttataaaaaatagtatagataaaaataggataatagaagaggataaatccacgaatacttatgagaattttaaatattcaaaattgaagatagaagaacatagtcaaagaaaactaagtgatttaaaagtaaaaatagtaacaacagattttcatgttctcagaagtaaaatattagcatatagaaatggatataaaaatacgtctttttatgctagtaaatcaaaactttcatttgtaccaacttactatacaagagaattttttgcattatggaaaacaatcatttttgatagataataaataaaaagactagatataaactcatatctagtcttttctattcccttaattctaatccattttccaactttacttgttgtagaaatttcaacattgggatttacaagtaattgcttataagaagttttatattttacgattccaaaatataattttccttcataatccattataaatccgaatgatcttactcttggtttattatcttcaactgtagcaaaatagaatgttgagttttcttttaaaaaattcattattttttccatgattaaatcctctttgtatcttatactaatataatgaatataaataaaatatttataatactaatataaattgatataaaaacaattacaatattatattgattattcaaaattatatataaaattcagaaaaacatttcagtttacataataaaaataaagtaaactaaaattattgattttagattaaagtgccagattaagtatttaagtagattttaagcttgatttgattagaaaggtacaaactatcaccgaaaaaaattaaacccatttaaaaagcaatataaaagcttgttattttcgagaaaaatagaccctctaaactcaattagataaaaataaaatacaaaaaattatatctctgaatatctcaagtaattaagtttaaattttacgatattttgtttgatgatttataatataaaagcatattcttaatcttctcaaattaaaaagagtaaaaaataacaaaaaaatcactgacatttcactgacaaattgtaattttgttattataaatacattgaaaatacttgattattgaaaaatggcataaaataataccttttatgccatttactattgtttgatagtttttaacttatgacataagatattttttaacatatacaataaaatataaaaaaattgatattgcaaataaaaaaaatacatattagatgttatagaaaaaaagcgcacttataggcttaaaatgtcacataaaagagtttcaaagaataatatattatgaacacaaattttgtaatcacaaaggagtgataatatggcaacagtatcaggacaaatagtttttgatagaaatagaagtgctaccattgattctggggactcaggaatagccaatataccagttgtattacaagatatagcaactggagttagacttgtggttctcacagatgcatcaggaaattatgtttttactaatgttccaaatggtaactatagaattgtagaagcttttggaactacaggaggagtaccaacaccagggaattttgcaacagcgatagtaggtccagttccaattgcagaaatgccacctattagttctgtgacaaatcctcctattggttcaacaaacttagatggtacaacacctaacacactattaataacagtagcaggttcagatataataaatcaaaatatattaaatgggcctgtgatttatacacctatagagaatatattggattcttgcgtgtctgtatctaatataaaccttattacagatgcagataacggaacattcggtttttttccaccaggtacaccaagtaatacaggacctgaaatagaaccttacccaaatgtgacgccagattttacgtatgttgtaccagacccaactaagtttacacctttagatggagaatatacagtacaaaatattatgacaaatgcaatgagtaatgttataggagcttggtggcgtattgctgaccatactacaggaaatgaaacaggaagaatgatggtggtaaatggttttaatcctggagctgtattttttaaatcaacagtacaagttacacctaacactaattatttatttagcacttggattttaaacctttttaaggtaacaggatatccaccaccacagctaggtgtaagaatatttgaccaaaataataatatactatatcaagcaacattaggagctcaaattccagttaatacaaacgcaccagaatggaaagaagtaggtactgtgattaattctcaaaataataatcaacttacagtagaattttttagtgaaggagaaagcgccattggaaatgactatgctatagatgatgtttctttaagagaaatagctgttccaacctttactccaataaaaacaagtaacacagaaactgctaatgtaggtgatataatcacatatacagttacattagataatacttgtgatagccctttaactaatgtattttttagggatttaattccaaatggtttagagtttatacctggaactgtaacggttgatggagtatctgtaccaggagtagaccctaatacaggttttccacttccagatattggaggaggaataggggttgaagtaacttttgatgttgtggttgaaagtattcctaacccaaatcctactaataatatagctactatagattactcctatacacctgtagaaggcggtataccaaatgatttttcagtagattctaatccagttcctgttgaagtaatctcagcagatgttgaagttacaaaattatctgaacctactatagtgaatccaggagaggaattaatatacactataaaagtagtaaataatggaccattcccatctgagaatgtggttttaacagatgatgtaccagcttctattataaatccagagtattcattagatggaggagtaacttttcaaccatggactggaagtttaaatatagggacattagaagtaggagagacaagagttattataattaggggtattgtaaatccatcaacagtaggaattataacaaatacagctgtagtatcttcaactacagcagacccaaaccttaataataatacatctacaatagagacagaagtgaatttattagcagatattttagtaatgaaaacagcagaacctaattcagctgttccaggtactttattgagatatactattcaagtagaaaacttaggaccagcaaatgctgaaaatgtaatattaaatgatgatattccagcctctattataaatccagaatattcattggatggaggagcaagttttcaaccatggaatggaagtcttaatataggaactttaaactctggaatttcattaacagttttaattcaaggaacagttagtttaaattcttcagaatatatagtaaatacagcaacagtttcttcaactacacctgacccagatttaagcaacaatatatctaccattattacaccagttaacccacaagcaggtatttctattataaaagtagctgacgaggatgtagctgttccaggagaagaatttgtatatacaattgaaatttttaatgaaggaccatctaatgctacgaatgtagttttaacagatgatataccagatgttattttaaatccagaatattcattggatggaggagcaactttccaaccatggaatggaagtcttaatataggtacagttgcaccagggcaattaataagaattatcataaagggattagtaagttcaactgctacaggagatattactaatacagcagaagtaagtgcagatgtaccagaaccagttacggattcatcaacagtgacaactcctatagttccatcagcagatatagaagtaataaaaactagcaatatggatacagcagttccaggagaaacttttagttatactataacagttataaatttaggaccatctgctgcacaaagtatcgttttgacagatgatataccagatgttattttaaatccagagtattcattggatggaggagtaactttccaaccatggaatggaaatcttagtataggcactttggatgctggagaaataagaagtattataataagaggaacagtgagccagacagcagtaggtacaattataaatacagcaacaataagttcacctacacctgacccaaatccagataataatacttcaacagatgaaacagatataagtccattagcagatatttctgtgataaaaggcaacgaaccagttgctataccagggggaagatttatttatggaattgaaattgcaaatgcaggaccatcttttgcagagaacgtaactttaacagataatataccagcttctattttaaatccagagtactcaatagataatggagtgactttccaaccatggaatggaagccttaatataggtactttagatgctggagagataagaaatatcataataaggggaacagtaagtcaaacagcaataggtacaattataaatacagcaacagtaagttcaactacacctgacccaaatctaaataacaatacttcaacatcagaagcagaggtaagttcatcagcagatatttctgtagtaaaacgaagcaatcagactgttgttgtaccaggagatgtactagactatacaattgaggtgagaaatgcaggaccgtctactgctcagaacgtaactttaacagataatataccagcttctattttaagtccagaatattcaatagataatggagtgacttttcaaccatggaatggaagtcttagtataggcactttaggtgctggagagataagaaatatcataataaggggaatagtaagtcaaacagcaataggtacaattataaatacagcaacagtaagttcaactacacctgacccaaatctaaataacaatacttcaacatcagaaatagatataagttcatcagcagatatttctgtaataaaattagcaaataaaacagaagcatgtgtagaagagcaaatagattttgtaatagtagtatcaaatgcaggaccagaaaatgctcaaaatgttactttaatagacaatgtttcagataagcttaagaaagcagtattttcacttgatagaggtgtaagtttccaaccatggactggaagtcttaatataggtacactaccagctggaactttaagagttattctattaagaggaattataaaatcaacatgtcttgatagattaacaaatattgcagaagttacttcaacaacaccagattcaaaccttaacaataatatatcaagagtgcaagtagaaataaaacaatgttgttgtaatgattgctgttgtaacaactgtagtaattgttgttgcaatgattgtggttgtaaagattgttgctgtaattgttgtaaaaatgacttttggtgttgattttataaaataattttgtataccttaaattaaactgaaataaaaaataaattcacatatgagtaaaatattttataaatattaataaattttctatctttgatatggaccacattcgtaatactagttattaaatgaagtggtcctttttaattcattaaaattatttattctaattaaattttaaatgtattaaataattttaattttttataaaaaatattcatatattctttatattaaagtttagatatctaaaaatacttttagaatttattatattatgttaatttttttatatcttataatgattatatttttctaactataaaaatagtatttacttatatttaaaaataaaagaattttattcctattgtgtaaagtgagaatactattttcttatattggtataataatagtaaatctataatatagaaaagaggtatttctagtatgcatgaaaataaaaagaatctattagacggaagcttagctcaatataatgatacagcagttccaaaaataccagtatttgctggtaacgatataacttcagaagtttattattttaaacctaatcaagttcttaatgctcatagacaccctaatggtgaacaaatatttgtgttcctaaaaggagaaggtaaaatgaaacttggtgagcatgaatgtgatgtaaaaaacggcgatactgtatttgtaccaacaggagagtggcatgaaattactaatggaagcaatgaagaaatggtagccgttcaaattacaaaaattaatgctggagcagaatacagaggatagatatataagtacagttagtactttaatatctattttattatataaactttaatctcaaatataaaaagagtcttttaaaaggctctttttatatttttgttaattttcattataaaaacaagaaaatatctagctaaaactaatatattttatttaatattttttatagcattgtttgcaaactcagtatttacgatatctttataaggtgcttccttatctagttctttagcttctttcataacagtcatcaatttcttcaaaccttcctcctttaatacaggattttgagaccatgcatctattgatttatatctatctacaactgttgttaaatcttctaaagatatatcttcaaagaaaggttgcatagccttagctacttctttgctagatgcttgttgaacccataattgacctttataaacagcatttgtaaatctttgaattaaatctttattgtttttcatgtatgatctcgtagtagagtatgctgtaaaaggtatttctccagaatcttttcctatagatgtaactatatatccactaccttctttttccattgctgttgctgtaggttcaaatgctgttgtaaagtcaccctctccacctgcaaaagctccagccattacaccaaattgtacatcagttcttacattaacattgcctgcttttagattttctccaatagtaagacctttttcttttagaacatattcaaaagtcattagtggaactccaccttttctaccacctaatatttctgttccttttaaatcattgtaagagaaattaggcatttttttcctagcaactagaaaactaccatctctttttgtcaattgagcaaagttcactgcataatcgtttttgttttgattatatacatatatagatgcttcaggacccattaaacctacgtttgcttcacctgaaatcaaagctgccatagttttatctgcaccttgggtatttataaggtcaatctttataccttcatcttcaaagaatcctttcgtaatagcagcatactgtggagcataaaaaacagagtgagtaacttctgctatagttactttatccagatttttagacgaagaagattcatcttttttgtcattagagttaaaatcacatccagttagacatattgtacttacaatgatagagcttgctattgcgactatttttttaaacataataaatacctcccataagacatacgaatagtatatagtattaaaaatttattgtagttgttacaaaaatgtatctatgcttataatatttctacaaaaacttaataataattttcagttttatgtttagtttttttagtaatatgtaatattggataaattatattgattatttataaactaagtaataaaattaaaataatatcacttttttgtctattatatataaggaaaaattttttaataatataaatcatattcatttatattattaaaaaatttgtttatagaaacttttattattttatataaaaatgataaaaacttatattttgtatttaatagagtgttgctaagtgaatatatttaaaatggaggaaactttatgaaacaaaataaatatgatgatgatagattttttaataaatacagtaaaatggaacgttctacaaatggattagcaggtgctggagaatggcatgttttaaaaaaaatgttacctgatttcaaaggaaaaagagttttagatttaggatgtggatttggatggcattgtcaatatgcagttgagaatggagcaatttctgctgttggagttgatatttcagaaaaaatgttaaaagaagctagaaacaaaacgcaacttgataatataaattacatatgtatgcctattgaagatattaattttccaaaagatagttttgatgtagttattagttccttggcatttcattatattcaatcatttgaagatatatgtaagaatataagtaattgtctttcaaataaaggtaattttgtattttctgttgaacatcctatatttactgcatatggaagtcaagagtggtactgtgataaagatggcaataatctacactggccagtagatagatattttgaagaaggagtacgtaagtcaaattttctaggagaagaggttataaaatatcataaaacattaacaacttatttaaatacgttaatgaaaacaggatttgaaatattagaaattattgaacctcaaccagaagaaaaactgttagatacaattcctgatatgaaagatgagctacgtagacctatgatgttacttgtatctgcaaaaaaaagataagtaaatataaataatcattattgtagaaaaaaattgtagaaaataattacactaatggagatgattataccagtggtattaattacaccagtagtaaggaggcaaaagcattcgttgcttttgccattttttaagttgcaattatacttctacgtagtatatttcgtttccattttcttctataagctttttcatatcttcaaattttaaaaatacagtagcagtattatcatttggatgtatacctattttatccatttttaataaatccttatcaaatacaacttttacaacagcctctttatcatttaatataccaaaaggagtcacagctcctttagtaagtttcaagtatttttgaagtctttcttctgatgcaaaactaagaggtttactatcaatttgttgacgaatatcttttaaatctgcttttttgtctttacctaatacaactaaaaaatgttcttttcctttagcatcacgaagaaataggttttttacaacaaattccatatgtaatgtttttaattcttccatttcttcaattgtataaactggtggatgatttacagcctcataaggtatgcttaactcatctaattttttatatacttcctgttgttgattgttcatgatttcctcccattagaaatttattttatatataaataatattatcacagaaaactttaaaagaaaacgttttatataatatagacaatagattatatttttataaagaagcaagaatactcaataaaacttaaagaaattaaacaatttctaaaaataccttgaaaatagaaccttatttgccatttataaattatataaaaagggattatataaagtcatatatgaaaaaactatattatactatcttttctttttggaataaactatactttaaatatagatatttaatttaaataaattttacagtattaatagtaaattatcttagaaaggaatgtgctttatatgtctacagacaaagttgttggaatcatagatgaagaaacggcagaacttgcaggaattgaatatactggtaaaatttatgcttcttctggtgttataaaacatataaagaaaaaacatagatgtcaactgagtaaggatatttttaatgatataatagacactataaaagtggtattaaagtcacctgaatatataggaagtcatcctaaaaaacctggaaaaagtgtggagtttataaaaaaaattgataattatattttagtagctacagaattagatacaaaaaaaggatatttatatgtatcttcaatgtatgctataaaagaagcaaaattagaaagtagagtaaacaatggaagagtaaaacaatatgatggttaacataatattattaattttccccaaaatattgaaaaatattattatataagttataatattaatatacacgtagatatttattagttagatttgaggttggaaaaggcacccaatacgctactatagagtagttaatagagatgcaggatacgccgccctgccaaatctaattaaattaaaaagagaggattaattcctctctttttgtttttttgagatactaatttaatctatatagaaagattgaaggtcatttatactaaaagttttcagttatatacattaaactaattaaataagatatttataatctatatatgatacatattatatattaataaaagaaaaatatatagaaaatccttataaaaatttaaattgtaatgaatagtaagtaattaaaaagaatttttattgatttttaaaaatttagttagaaactatatcattatggtaaagaatgtattataatgtttagaaatattataataaggagcgattaaacatgaatctatcgaagaaaatagaagataaaagaaaagctaaacagagagctgaaaaagttaagaaagctaaaattgctacagctggtgtggtattaggagctgttactggtgcagtgagtggagtacttttggctcctaaatctggaaaagaaacaagagaggatataaaagatgcttcacaacaaattgctgaaaagataaatatgaaaactgtagatgtaaaaggcaaagtatctgagaagctagaggataaaaaaggaaactttatagaatcaaagaaaaaaataaaaaaatatatagataacaaaaagagtgttgaaaattctagtgaggaagataaaataatagatatagttgaaccagttagtgttactgaggaataatatggacaatacaataacgattaacataagtataatatatgtattattagctatacttgcttgtattgctttagtttatttaattattgtacttgttaaactacataagattttaaataatgttggaactatgttaaatgaaaatactcaaaatataaatacaactttaaataatcttcctaatgttgtagaaacttttggagaagtaggagaaaatatgaaagatgtaacagaagtagttactgaagttacagcagattttcttgttactaaagacagtgtcaaatcaaatatggatgttatagtcgatatattgactataattaaaaatatttttctagataaaaagtaataaatttaatataaaataagatataatttaaacgaccttaaaataacatttataaggtcgttttttattagcttgatttgacactatgtgtttttaataattggtaatattcctctttatcatttgaacatatatatctatgcttgttgtttcaattacatccataagaacatctttacattcaagctcaaaatcttccattccttctaaatattcatcatcttcatcaaaaaagatataagaattatatagccattcttcaaatttttcttcaagtatatcccaatacgaactccaaaataatccacaacctgatatataagatgctctactttgatttatataaacctcatttagaagcttttgtaatctactgctataaagaaaatctgctcttccactgcttgatattaattcatttaaatcttctattgacattaattcaactttaccacttttatcataaggagtataattttcatcaacccatttatgtggtttgttttctctgcatactgttgctatcaactctacaacttttgttcttatcatttttttatcctaacttatttattttttataaaataatcatgattttataatttatctatttcttgtaatgctaatttaacagtttcatatctatcagcaccatttattactacatcaccttttacaagtttattagcttctccacctacaacataaacctttttacctaaaccttgcttataactagacgcctcaattattaaagaatctttcaattgccaatgtaaaatctgagcagccactttatcagcatcacctgtataaacgattacattttcatacactttattttcccctcccccttgagaatttgatatagatttgtttagtataccttctgctatcaatttagcaactttatctttattattaacataataatctgtatctgctttactatctacaaaacatacttctattaatattgctggtgcaatagtatgattaagccaataaagacctctaacatcagactttgcacccctatctttgaatactgtagctaacctagtattcactctttctgcataggttttgccattattagtcttatatattgtttctgtccctactggagttgaagttgtagcatttgaattaaaatgaatctgaacagccaaatcagtttcctgtttatttgctatagcacattggtctgctaaatgattacttgattcatcaactcttcctgtataaacagtagctccacctattttaagccatttaacaattaagtcattcagtattcttgtttctttgctttcgtttatatacccaacagctcctgtaccttttccaattaaagtgtgccctggtattattactactttcaaactaacatctcctttacaattaaatttaacttctatttaatatatgcataacctagaattttgtttctttttatatcttatacttttattataacccattttgtaaaaatatagaatattaagtaaataatgttaaaattataattttgtatataagacattacttgattgcaataattttatagcatattcatctattctatatccagttctataatatatatgtttaattccagcttgaattatagccttagtacaatttaagcaaggaaagtgagttacataaatagagcaatctttaactgaaataccttcttttgcacaataataaagggcattttgttcagcgtgaatggttctaatacaatgtccatctctcatttcatgaccaacttcactacaatgcttatctccagaaatactaccattatatccagtagacactattctgttttctgaattgacaattatagctcctacataagctctatcacaagttcctctttcagctactgtttcgcacagtctcataaaatattcttgccatgagcatctattttcaagttttttattcaaatcatatacctccaaaatttatatctaatatataagatttataccttaaaaataatattaaaaacaaatttatacgataaataaaatttattaatactgtttttagtctaaattatttcattttaaattaaagttacaaggaatctaaaattatatatatctttcttcgtaatatgaatgttacaatataaaaaactgtctcaataaaatagagacagttttacagtcaaagtttataatacaagttcatatttttctttaaattcttttacagcttcgggccatgccttttgttctgtaatacctttttctttagctattttaattgcaatctctcttatcattgcagcgccttctaatattcccatttttaatctcccttcaaatatctttttgtatagaatataaatagtgctaagatttattacatgctgcatatacaatatctatacaacacataacttgtaaattccttttattttcatacgtctttaaccgacatataattatattcaataagttttaaaattatgaactcaattataattatttttatttttttagaatctaaacactaaaaattgtaggtaaatttgtcttatgcctttataaatatttctacagttttaattactggacatatctatttttattataaaaagcgcttaaaaatcgagaatatccgcgtaaaagctgtatataagcaaaacgattaaaggaaaaagaagaaatttacttgaatgttaaaatgcgttgcttgaagcaacgggcagttttgcctataatatcggtaacaactgaaagaaaggtggttagccctaatgttaagcgaaaacattaaaacaatcaggaagtcaaaaggactttcacaacaagaacttgctatcaaactgaatgtagtgcgacaaacaatatctaaatgggaacaaggactgtcggttcccgattctgatatgttgatttccatatcagaggtgcttgaaacgcctgtaagcactttacttggagaaactattgttgagtcggaagttgatagcttaaaagtgatttctgaaaaattagagattataaacttgcaacttgcacaaagaaaaaacatgagaagaaaaatgtttcattggttatttattttattatgtgcagtcatagtaatagtttttgtggtcttagggggactaaatagtccttacttggattggaattataccgaccctgaaaccgctgtttttggagtagcttttcatgcttttgagtggctatttgtcagattagtaccgattgtccttataggagcaattattggaatctttttgacacgtaagaaaatatgaagtaactctgctttttataatatagcaag

(The sequence listing continues in the following parts.)
